(19) United States
(12) Patent Application Publication
(10) Pub. No.: US 2010/0099083 A1
(43) Pub. Date: Apr. 22, 2010

(54) CROHN DISEASE SUSCEPTIBILITY GENE

(75) Inventors: John Verner Raelson, Ville St-Laurent (CA); Stefan Schreiber, Ville St-Laurent (CA); Randall David Little, Ville St-Laurent (CA); Andre Franke, Ville St-Laurent (CA); Jochen Hampe, Ville St-Laurent (CA); Tim Keith, Ville St-Laurent (CA); Vanessa Bruat, Ville St-Laurent (CA); Abdelmajid Belouchi, Ville St-Laurent (CA)

Correspondence Address: DOWELL & DOWELL P.C., 103 Oronoco St., Suite 220, Alexandria, VA, 22314, US

(73) Assignee: GENIZON BIOSCIENCES INC, VILLE ST-LAURENT (CA)

(21) Appl. No.: 12/309,635

(22) PCT Filed: Jul. 26, 2007
(86) PCT No.: PCT/US07/74481

§ 371 Date: Nov. 30, 2009

Related U.S. Application Data
(60) Provisional application No. 60/833,261, filed on Jul. 26, 2006.
(60) Provisional application No. 60/834,151, filed on Jul. 31, 2006.

(51) Int. Cl. C12Q 1/68; G01N 33/53; C40B 20/00

(52) U.S. Cl. 435/6; 436/94; 435/7.21; 506/2

(57) ABSTRACT

The present invention relates to the ATG16l1 gene and genetic variants associated with Crohn's disease. In particular, the invention relates to the fields of pharmacogenomics, diagnostics, patient therapy and the use of genetic haplotype information to predict an individual's susceptibility to Crohn's disease and/or their response to a particular drug or drugs.

### CROSS-REFERENCE TO RELATED APPLICATIONS

[0001] This application claims priority to U.S. Provisional Application No. 60/833,261, filed Jul. 26, 2006 and U.S. Provisional Application No. 60/834,151, filed Jul. 31, 2006, which are herein incorporated by reference in their entirety.

[0002] The contents of the Jul. 31, 2006 submission on compact discs are incorporated herein by reference in their entirety: A compact disc copy of the Sequence Listing (COPY 1) (filename: GENI 018 01US SeqList.txt, date recorded: Jul. 31, 2006, file size 793,000 bytes); a duplicate compact disc copy of the Sequence Listing (COPY 2) (filename: GENI 018 01US SeqList.txt, date recorded: Jul. 31, 2006, file size 793,000 bytes); a computer readable format copy of the Sequence Listing (CRF COPY) (filename: GENI 018 01US SeqList.txt, date recorded: Jul. 31, 2006, file size 793,000 bytes).

### FIELD OF THE INVENTION

[0003] The invention relates to the field of genomics and genetics, including genome analysis and the study of DNA variations. In particular, the invention relates to the fields of pharmacogenomics, diagnostics, patient therapy and the use of genetic haplotype information to predict an individual's susceptibility to Crohn's disease and/or their response to a particular drug or drugs, so that drugs tailored to genetic differences of population groups may be developed and/or administered to the appropriate population.

[0004] The invention also relates to the autophagy-related 16-like (ATG16L1) gene for Crohn's disease, which links variations in DNA (including both genic and non-genic regions) to an individual's susceptibility to Crohn's disease and/or response to a particular drug or drugs.

[0005] The invention further relates to the genes disclosed in the Crohn Disease candidate region 1 (see Tables 4-6) and, which is related to methods and reagents for detection of an individual's increased or decreased risk for Crohn's disease by identifying at least one polymorphism in one or a combination of the genes from candidate region 1, which are associated with Crohn's disease.

[0006] In addition, the invention further relates to nucleotide sequences of those genes including genomic DNA sequences, cDNA sequences, single nucleotide polymorphisms (SNPs), other types of polymorphisms (insertions, deletions, microsatellites) found in candidate regon 1, alleles and haplotypes (see Sequence Listing and Tables 2, 3 and 7-10).

[0007] The invention further relates to isolated nucleic acids comprising these nucleotide sequences and isolated polypeptides or peptides encoded thereby. Also related are expression vectors and host cells comprising the disclosed nucleic acids or fragments thereof, as well as antibodies that bind to the encoded polypeptides or peptides.

[0008] The present invention further relates to ligands that modulate the activity of the disclosed genes or gene products. In addition, the invention relates to diagnostics and therapeutics for Crohn's disease, utilizing the disclosed nucleic acids, polymorphisms, chromosomal regions, gene maps, polypeptides or peptides, antibodies and/or ligands and small molecules that activate or repress relevant signaling events.

### BACKGROUND OF THE INVENTION

[0009] Inflammatory bowel disease has a prevalence of 2-5/1000 individuals in West-European and North-American populations, with a median age of onset in early adulthood. The disease is characterized by chronic relapsing intestinal mucosal inflammation, leading to abdominal pain, chronic diarrhoea, rectal bleeding, weight loss and different intestinal and extra-intestinal manifestations including arthritis and uveitis. On the basis of clinical and histopathological features, IBD can be categorized into two main subtypes, Crohn disease and ulcerative colitis. A genetic component in the aetiology of IBD has been demonstrated by both epidemiological and molecular genetic studies. Thus, epidemiological investigations have consistently revealed familial clustering of the disease and an increased concordance of the IBD phenotype in monozygotic twins. Family data further suggest that the genetic contribution to Crohn disease is greater than that to UC, with relative sibling risk estimates (λ_{S}) ranging from 15 to 35 for Crohn disease and from 6 to 9 for UC, depending upon the population and ascertainment method used.

[0010] Crohn's disease is an Inflammatory Bowel Disease (IBD) in which inflammation extends beyond the inner gut lining and penetrates deeper layers of the intestinal wall of any part of the digestive system (esophagus, stomach, small intestine, large intestine, and/or anus). Crohn's disease is a chronic, lifelong disease which can cause painful, often life altering symptoms including diarrhea, cramping and rectal bleeding. Crohn's disease occurs most frequently in the industrialized world and the typical age of onset falls into two distinct ranges, 15 to 30 years of age and 60 to 80 years of age. The highest mortality is during the first years of disease, and in cases where the disease symptoms are long lasting, an increased risk of colon cancer is observed. Crohn's disease presently accounts for approximately two thirds of IBD-related physician visits and hospitalizations, and 50 to 80% of Crohn's disease patients eventually require surgical treatment. Development of Crohn's disease is influenced by environmental and host specific factors, together with “exogenous biological factors” such as constituents of the intestinal flora (the naturally occurring bacteria found in the intestine). It is believed that in genetically predisposed individuals, exogenous factors such as infectious agents, and host-specific characteristics such as intestinal barrier function and/or blood supply, combine with specific environmental factors to cause a chronic state of improperly regulated immune system function. In this hypothetical model, microorganisms trigger an immune response in the intestine, and in susceptible individuals, this immune response is not turned off when the microorganism is cleared from the body. The chronically “turned on” immune response causes damage to the intestine resulting in the symptoms of Crohn's disease.

[0011] Current treatments for Crohn's disease are primarily aimed at reducing symptoms by suppressing inflammation and do not address the root cause of the disease. Despite a preponderance of evidence showing inheritance of a risk for Crohn's disease through epidemiological studies and genome wide linkage analyses, the genes affecting Crohn's disease have yet to be discovered (Hugot J P, and Thomas G., 1998). There is a need in the art for identifying specific genes related to Crohn's disease to enable the development of therapeutics that address the causes of the disease rather than relieving its symptoms. The failure in past studies to identify causative genes in complex diseases, such as Crohn's disease, has been due to the lack of appropriate methods to detect a sufficient number of variations in genomic DNA samples (markers), the insufficient quantity of necessary markers available, and the number of needed individuals to enable such a study. The present invention addresses these issues.

### DEFINITIONS

[0012] Throughout the description of the present invention, several terms are used that are specific to the science of this field. For the sake of clarity and to avoid any misunderstanding, these definitions are provided to aid in the understanding of the specification and claims:

[0013] Allele: One of a pair, or series, of forms of a gene or non-genic region that occur at a given locus in a chromosome. Alleles are symbolized with the same basic symbol (e.g., B for dominant and b for recessive; B1, B2, Bn for n additive alleles at a locus). In a normal diploid cell there are two alleles of any one gene (one from each parent), which occupy the same relative position (locus) on homologous chromosomes. Within a population there may be more than two alleles of a gene. See multiple alleles. SNPs also have alleles, i.e., the two (or more) nucleotides that characterize the SNP.

[0014] Amplification of nucleic acids: refers to methods such as polymerase chain reaction (PCR), ligation amplification (or ligase chain reaction, LCR) and amplification methods based on the use of Q-beta replicase. These methods are well known in the art and are described, for example, in U.S. Pat. Nos. 4,683,195 and 4,683,202. Reagents and hardware for conducting PCR are commercially available. Primers useful for amplifying sequences from the disorder region are preferably complementary to, and preferably hybridize specifically to, sequences in the disorder region or in regions that flank a target region therein. Genes from Tables 4-6 generated by amplification may be sequenced directly. Alternatively, the amplified sequence(s) may be cloned prior to sequence analysis.

[0015] Antigenic component: is a moiety that binds to its specific antibody with sufficiently high affinity to form a detectable antigen-antibody complex.

[0016] Antibodies: refer to polyclonal and/or monoclonal antibodies and fragments thereof, and immunologic binding equivalents thereof, that can bind to proteins and fragments thereof or to nucleic acid sequences from the disorder region, particularly from the disorder gene products or a portion thereof. The term antibody is used both to refer to a homogeneous molecular entity, or a mixture such as a serum product made up of a plurality of different molecular entities. Proteins may be prepared synthetically in a protein synthesizer and coupled to a carrier molecule and injected over several months into rabbits. Rabbit sera are tested for immunoreactivity to the protein or fragment. Monoclonal antibodies may be made by injecting mice with the proteins, or fragments thereof. Monoclonal antibodies can be screened by ELISA and tested for specific immunoreactivity with protein or fragments thereof (Harlow et al., 1988, Antibodies: A Laboratory Manual, Cold Spring Harbor Laboratory, Cold Spring Harbor, N.Y.). These antibodies will be useful in developing assays as well as therapeutics.

[0017] Associated allele: refers to an allele at a polymorphic locus that is associated with a particular phenotype of interest, e.g., a predisposition to a disorder or a particular drug response.

[0018] cDNA: refers to complementary or copy DNA produced from an RNA template by the action of RNA-dependent DNA polymerase (reverse transcriptase). Thus, a cDNA clone means a duplex DNA sequence complementary to an RNA molecule of interest, included in a cloning vector or PCR amplified. This term includes genes from which the intervening sequences have been removed.

[0019] cDNA library: refers to a collection of recombinant DNA molecules containing cDNA inserts that together comprise essentially all of the expressed genes of an organism or tissue. A cDNA library can be prepared by methods known to one skilled in the an (see, e.g., Cowell and Austin, 1997, “DNA Library Protocols,” Methods in Molecular Biology). Generally, RNA is first isolated from the cells of the desired organism, and the RNA is used to prepare cDNA molecules.

[0020] Cloning: refers to the use of recombinant DNA techniques to insert a particular gene or other DNA sequence into a vector molecule. In order to successfully clone a desired gene, it is necessary to use methods for generating DNA fragments, for joining the fragments to vector molecules, for introducing the composite DNA molecule into a host cell in which it can replicate, and for selecting the clone having the target gene from amongst the recipient host cells.

[0021] Cloning vector: refers to a plasmid or phage DNA or other DNA molecule that is able to replicate in a host cell. The cloning vector is typically characterized by one or more endonuclease recognition sites at which such DNA sequences may be cleaved in a determinable fashion without loss of an essential biological function of the DNA, and which may contain a selectable marker suitable for use in the identification of cells containing the vector.

[0022] Coding sequence or a protein-coding sequence: is a polynucleotide sequence capable of being transcribed into mRNA and/or capable of being translated into a polypeptide or peptide. The boundaries of the coding sequence are typically determined by a translation start codon at the 5-terminus and a translation stop codon at the 3′-terminus.

[0023] Complement of a nucleic acid sequence: refers to the antisense sequence that participates in Watson-Crick base-pairing with the original sequence.

[0024] Disorder region: refers to the portions of the human chromosome displayed in Table 1 bounded by the markers from Tables 2, 3 and 7-10.

[0025] Disorder-associated nucleic acid or polypeptide sequence: refers to a nucleic acid sequence that maps to region of Table 1 or the polypeptides encoded therein (Tables 4-6, nucleic acids, and polypeptides). For nucleic acids, this encompasses sequences that are identical or complementary to the gene sequences from Tables 4-6, as well as sequence-conservative, function-conservative, and non-conservative variants thereof. For polypeptides, this encompasses sequences that are identical to the polypeptide, as well as function-conservative and non-conservative variants thereof. Included are the alleles of naturally-occurring polymorphisms causative of Crohn's disease such as, but not limited to, alleles that cause altered expression of genes of Tables 4-6 and alleles that cause altered protein levels or stability (e.g., decreased levels, increased levels, expression in an inappropriate tissue type, increased stability, and decreased stability).

[0026] Expression vector: refers to a vehicle or plasmid that is capable of expressing a gene that has been cloned into it, after transformation or integration in a host cell. The cloned gene is usually placed under the control of (i.e., operably linked to) a regulatory sequence.

[0027] Function-conservative variants: are those in which a change in one or more nucleotides in a given codon position results in a polypeptide sequence in which a given amino acid residue in the polypeptide has been replaced by a conservative amino acid substitution. Function-conservative variants also include analogs of a given polypeptide and any polypeptides that have the ability to elicit antibodies specific to a designated polypeptide.

[0028] Founder population: Also called a population isolate, this is a large number of people who have mostly descended, in genetic isolation from other populations, from a much smaller number of people who lived many generations ago.

[0029] Gene: Refers to a DNA sequence that encodes through its template or messenger RNA a sequence of amino acids characteristic of a specific peptide, polypeptide, or protein. The term “gene” also refers to a DNA sequence that encodes an RNA product. The term gene as used herein with reference to genomic DNA includes intervening, non-coding regions, as well as regulatory regions, and can include 5′ and 3′ ends. A gene sequence is wild-type if such sequence is usually found in individuals unaffected by the disorder or condition of interest. However, environmental factors and other genes can also play an important role in the ultimate determination of the disorder. In the context of complex disorders involving multiple genes (oligogenic disorder), the wild type, or normal sequence can also be associated with a measurable risk or susceptibility, receiving its reference status based on its frequency in the general population.

[0030] Genotype: Set of alleles at a specified locus or loci.

[0031] Haplotype: The allelic pattern of a group of (usually contiguous) DNA markers or other polymorphic loci along an individual chromosome or double helical DNA segment. Haplotypes identify individual chromosomes or chromosome segments. The presence of shared haplotype patterns among a group of individuals implies that the locus defined by the haplotype has been inherited, identical by descent (IBD), from a common ancestor. Detection of identical by descent haplotypes is the basis of linkage disequilibrium (LD) mapping. Haplotypes are broken down through the generations by recombination and mutation. In some instances, a specific allele or haplotype may be associated with susceptibility to a disorder or condition of interest, e.g., Crohn's disease. In other instances, an allele or haplotype may be associated with a decrease in susceptibility to a disorder or condition of interest, i.e., a protective sequence.

[0032] Host: includes prokaryotes and eukaryotes. The term includes an organism or cell that is the recipient of an expression vector (e.g., autonomously replicating or integrating vector).

[0033] Hybridizable: nucleic acids are hybridizable to each other when at least one strand of the nucleic acid can anneal to another nucleic acid strand under defined stringency conditions. In some embodiments, hybridization requires that the two nucleic acids contain at least 10 substantially complementary nucleotides; depending on the stringency of hybridization, however, mismatches may be tolerated. The appropriate stringency for hybridizing nucleic acids depends on the length of the nucleic acids and the degree of complementarity, and can be determined in accordance with the methods described herein.

[0034] Identity by descent (IBD): Identity among DNA sequences for different individuals that is due to the fact that they have all been inherited from a common ancestor. LD mapping identifies IBD haplotypes as the likely location of disorder genes shared by a group of patients.

[0035] Identity: as known in the art, is a relationship between two or more polypeptide sequences or two or more polynucleotide sequences, as determined by comparing the sequences. In the art, identity also means the degree of sequence relatedness between polypeptide or polynucleotide sequences, as the case may be, as determined by the match between strings of such sequences. Identity and similarity can be readily calculated by known methods, including but not limited to those described in A. M. Lesk (ed), 1988, Computational Molecular Biology, Oxford University Press, NY; D. W. Smith (ed), 1993, Biocomputing. Informatics and Genome Projects, Academic Press, NY; A. M. Griffin and H. G. Griffin, H. G (eds), 1994, Computer Analysis of Sequence Data, Part 1, Humana Press, NJ; G. von Heinje, 1987, Sequence Analysis in Molecular Biology, Academic Press; and M. Gribskov and J. Devereux (eds), 1991, Sequence Analysis Primer, M Stockton Press, NY; H. Carillo and D. Lipman, 1988, SIAM J. Applied Math., 48:1073.

[0036] Immunogenic component: is a moiety that is capable of eliciting a humoral and/or cellular immune response in a host animal.

[0037] Isolated nucleic acids: are nucleic acids separated away from other components (e.g., DNA, RNA, and protein) with which they are associated (e.g., as obtained from cells, chemical synthesis systems, or phage or nucleic acid libraries). Isolated nucleic acids are at least 60% free, preferably 75% free, and most preferably 90% free from other associated components. In accordance with the present invention, isolated nucleic acids can be obtained by methods described herein, or other established methods, including isolation from natural sources (e.g., cells, tissues, or organs), chemical synthesis, recombinant methods, combinations of recombinant and chemical methods; and library screening methods.

[0038] Isolated polypeptides or peptides: are those that are separated from other components (e.g., DNA, RNA, and other polypeptides or peptides) with which they are associated (e.g., as obtained from cells, translation systems, or chemical synthesis systems). In a preferred embodiment, isolated polypeptides or peptides are at least 10% pure; more preferably, 80% or 90% pure. Isolated polypeptides and peptides include those obtained by methods described herein, or other established methods, including isolation from natural sources (e.g., cells, tissues, or organs), chemical synthesis, recombinant methods, or combinations of recombinant and chemical methods. Proteins or polypeptides referred to herein as recombinant are proteins or polypeptides produced by the expression of recombinant nucleic acids. A portion as used herein with regard to a protein or polypeptide, refers to fragments of that protein or polypeptide. The fragments can range in size from 5 amino acid residues to all but one residue of the entire protein sequence. Thus, a portion or fragment can be at least 5, 5-50, 50-100, 100-200, 200-400, 400-800, or more consecutive amino acid residues of a protein or polypeptide.

[0039] Linkage disequilibrium (LD): the situation in which the alleles for two or more loci do not occur together in individuals sampled from a population at frequencies predicted by the product of their individual allele frequencies. In other words, markers that are in LD do not follow Mendel's second law of independent random segregation. LD can be caused by any of several demographic or population artifacts as well as by the presence of genetic linkage between markers. However, when these artifacts are controlled and eliminated as sources of LD, then LD results directly from the fact that the loci involved are located close to each other on the same chromosome so that specific combinations of alleles for different markers (haplotypes) are inherited together. Markers that are in high LD can be assumed to be located near each other and a marker or haplotype that is in high LD with a genetic trait can be assumed to be located near the gene that affects that trait. The physical proximity of markers can be measured in family studies where it is called linkage or in population studies where it is called linkage disequilibrium.

[0040] LD mapping: population based gene mapping, which locates disorder genes by identifying regions of the genome where haplotypes or marker variation patterns are shared statistically more frequently among disorder patients compared to healthy controls. This method is based upon the assumption that many of the patients will have inherited an allele associated with the disorder from a common ancestor (IBD), and that this allele will be in LD with the disorder gene.

[0041] Locus: a specific position along a chromosome or DNA sequence. Depending upon context, a locus could be a gene, a marker, a chromosomal band or a specific sequence of one or more nucleotides.

[0042] Minor allele frequency (MAF): the population frequency of one of the alleles for a given polymorphism, which is equal or less than 50%. The sum of the MAF and the Major allele frequency equals one.

[0043] Markers: an identifiable DNA sequence that is variable (polymorphic) for different individuals within a population. These sequences facilitate the study of inheritance of a trait or a gene. Such markers are used in mapping the order of genes along chromosomes and in following the inheritance of particular genes; genes closely linked to the marker or in LD with the marker will generally be inherited with it. Two types of markers are commonly used in genetic analysis, microsatellites and SNPs.

[0044] Microsatellite: DNA of eukaryotic cells comprising a repetitive, short sequence of DNA that is present as tandem repeats and in highly variable copy number, flanked by sequences unique to that locus.

[0045] Mutant sequence: if it differs from one or more wild-type sequences. For example, a nucleic acid from a gene listed in Tables 4-6 containing a particular allele of a single nucleotide polymorphism may be a mutant sequence. In some cases, the individual carrying this allele has increased susceptibility toward the disorder or condition of interest. In other cases, the mutant sequence might also refer to an allele that decreases the susceptibility toward a disorder or condition of interest and thus acts in a protective manner. The term mutation may also be used to describe a specific allele of a polymorphic locus.

[0046] Non-conservative variants: are those in which a change in one or more nucleotides in a given codon position results in a polypeptide sequence in which a given amino acid residue in a polypeptide has been replaced by a non-conservative amino acid substitution, Non-conservative variants also include polypeptides comprising non-conservative amino acid substitutions.

[0047] Nucleic acid or polynucleotide: purine- and pyrimidine-containing polymers of any length, either polyribonucleotides or polydeoxyribonucleotide or mixed polyribo polydeoxyribonucleotides. This includes single- and double-stranded molecules, i.e., DNA-DNA, DNA-RNA and RNA-RNA hybrids, as well as protein nucleic acids (PNA) formed by conjugating bases to an amino acid backbone. This also includes nucleic acids containing modified bases.

[0048] Nucleotide: a nucleotide, the unit of a DNA molecule, is composed of a base, a 2′-deoxyribose and phosphate ester(s) attached at the 5′ carbon of the deoxyribose. For its incorporation in DNA, the nucleotide needs to possess three phosphate esters but it is converted into a monoester in the process.

[0049] Operably linked: means that the promoter controls the initiation of expression of the gene. A promoter is operably linked to a sequence of proximal DNA if upon introduction into a host cell the promoter determines the transcription of the proximal DNA sequence(s) into one or more species of RNA. A promoter is operably linked to a DNA sequence if the promoter is capable of initiating transcription of that DNA sequence.

[0050] Ortholog: denotes a gene or polypeptide obtained from one species that has homology to an analogous gene or polypeptide from a different species.

[0051] Paralog: denotes a gene or polypeptide obtained from a given species that has homology to a distinct gene or polypeptide from that same species.

[0052] Phenotype: any visible, detectable or otherwise measurable property of an organism such as symptoms of, or susceptibility to, a disorder.

[0053] Polymorphism: occurrence of two or more alternative genomic sequences or alleles between or among different genomes or individuals at a single locus. A polymorphic site thus refers specifically to the locus at which the variation occurs. In some cases, an individual carrying a particular allele of a polymorphism has an increased or decreased susceptibility toward a disorder or condition of interest.

[0054] Portion and fragment: are synonymous. A portion as used with regard to a nucleic acid or polynucleotide refers to fragments of that nucleic acid or polynucleotide. The fragments can range in size from 8 nucleotides to all but one nucleotide of the entire gene sequence. Preferably, the fragments are at least about 8 to about 10 nucleotides in length; at least about 12 nucleotides in length; at least about 15 to about 20 nucleotides in length; at least about 25 nucleotides in length; or at least about 35 to about 55 nucleotides in length.

[0055] Probe or primer: refers to a nucleic acid or oligonucleotide that forms a hybrid structure with a sequence in a target region of a nucleic acid due to complementarity of the probe or primer sequence to at least one portion of the target region sequence.

[0056] Protein and polypeptide: are synonymous. Peptides are defined as fragments or portions of polypeptides, preferably fragments or portions having at least one functional activity (e.g., proteolysis, adhesion, fusion, antigenic, or intracellular activity) as the complete polypeptide sequence.

[0057] Recombinant nucleic acids: nucleic acids which have been produced by recombinant DNA methodology, including those nucleic acids that are generated by procedures which rely upon a method of artificial replication, such as the polymerase chain reaction (PCR) and/or cloning into a vector using restriction enzymes. Portions of recombinant nucleic acids which code for polypeptides can be identified and isolated by, for example, the method of M. Jasin et al., U.S. Pat. No. 4,952,501.

[0058] Regulatory sequence: refers to a nucleic acid sequence that controls or regulates expression of structural genes when operably linked to those genes. These include, for example, the lac systems, the trp system, major operator and promoter regions of the phage lambda, the control region of fd coat protein and other sequences known to control the expression of genes in prokaryotic or eukaryotic cells. Regulatory sequences will vary depending on whether the vector is designed to express the operably linked gene in a prokaryotic or eukaryotic host, and may contain transcriptional elements such as enhancer elements, termination sequences, tissue-specificity elements and/or translational initiation and termination sites.

[0059] Sample: as used herein refers to a biological sample, such as, for example, tissue or fluid isolated from an individual or animal (including, without limitation, plasma, serum, cerebrospinal fluid, lymph, tears, nails, hair, saliva, milk, pus, and tissue exudates and secretions) or from in vitro cell culture-constituents, as well as samples obtained from, for example, a laboratory procedure.

[0060] Single nucleotide polymorphism (SNP): variation of a single nucleotide. This includes the replacement of one nucleotide by another and deletion or insertion of a single nucleotide. Typically, SNPs are biallelic markers although tri- and tetra-allelic markers also exist. For example, SNP A\C may comprise allele C or allele A (Tables 2, 3 and 7-10). Thus, a nucleic acid molecule comprising SNP A\C may include a C or A at the polymorphic position. For clarity purposes, an ambiguity code is used in Tables 2, 3 and 7-10 and the sequence listing, to represent the variations. For a combination of SNPs, the term “haplotype” is used, e.g. the genotype of the SNPs in a single DNA strand that are linked to one another. In certain embodiments, the term “haplotype” is used to describe a combination of SNP alleles, e.g., the alleles of the SNPs found together on a single DNA molecule. In specific embodiments, the SNPs in a haplotype are in linkage disequilibrium with one another.

[0061] Sequence-conservative: variants are those in which a change of one or more nucleotides in a given codon position results in no alteration in the amino acid encoded at that position (i.e., silent mutation).

[0062] Substantially homologous: a nucleic acid or fragment thereof is substantially homologous to another if, when optimally aligned (with appropriate nucleotide insertions and/or deletions) with the other nucleic acid (or its complementary strand), there is nucleotide sequence identity in at least 60% of the nucleotide bases, usually at least 70%, more usually at least 80%, preferably at least 90%, and more preferably at least 95-98% of the nucleotide bases. Alternatively, substantial homology exists when a nucleic acid or fragment thereof will hybridize, under selective hybridization conditions, to another nucleic acid (or a complementary strand thereof). Selectivity of hybridization exists when hybridization which is substantially more selective than total lack of specificity occurs. Typically, selective hybridization will occur when there is at least about 55% sequence identity over a stretch of at least about nine or more nucleotides, preferably at least about 65%, more preferably at least about 75%, and most preferably at least about 90% (M. Kanehisa, 1984, Nucl. Acids Res. 11:203-213). The length of homology comparison, as described, may be over longer stretches, and in certain embodiments will often be over a stretch of at least 14 nucleotides, usually at least 20 nucleotides, more usually at least 24 nucleotides, typically at least 28 nucleotides, more typically at least 32 nucleotides, and preferably at least 36 or more nucleotides.

[0063] Wild-type gene from Tables 4-6: refers to the reference sequence. The wild-type gene sequences from Tables 4-6 used to identify the variants (polymorphisms, alleles, and haplotypes) described in detail herein.

[0064] Technical and scientific terms used herein have the meanings commonly understood by one of ordinary skill in the art to which the present invention pertains, unless otherwise defined. Reference is made herein to various methodologies known to those of skill in the art. Publications and other materials setting forth such known methodologies to which reference is made are incorporated herein by reference in their entireties as though set forth in full, Standard reference works setting forth the general principles of recombinant DNA technology include J. Sambrook et al., 1989, Molecular Cloning: A Laboratory Manual, 2d Ed., Cold Spring Harbor Laboratory Press, Cold Spring Harbor, N.Y.; P. B. Kaufman et al., (eds), 1995, Handbook of Molecular and Cellular Methods in Biology and Medicine, CRC Press, Boca Raton; M. J. McPherson (ed), 1991, Directed Mutagenesis: A Practical Approach, IRL Press, Oxford; J. Jones, 1992, Amino Acid and Peptide Synthesis, Oxford Science Publications, Oxford; B. M. Austen and O. M. R. Westwood, 1991, Protein Targeting and Secretion, IRL Press, Oxford; D. N Glover (ed), 1985, DNA Cloning, Volumes I and 11; M. J. Gait (ed), 1984, Oligonucleotide Synthesis; B. D. Hames and S. J. Higgins (eds), 1984, Nucleic Acid Hybridization; Quirke and Taylor (eds), 1991, PCR-A Practical Approach; Harries and Higgins (eds), 1984, Transcription and Translation; R. I. Freshney (ed), 1986, Animal Cell Culture; Immobilized Cells and Enzymes, 1986, IRL Press; Perbal, 1984, A Practical Guide to Molecular Cloning, J. H. Miller and M. P. Calos (eds), 1987, Gene Transfer Vectors for Mammalian Cells, Cold Spring Harbor Laboratory Press; M. J. Bishop (ed), 1998, Guide to Human Genome Computing, 2d Ed., Academic Press, San Diego, Calif.; L. F. Peruski and A. H. Peruski, 1997, The Internet and the New Biology. Tools for Genomic and Molecular Research, American Society for Microbiology, Washington, D.C. Standard reference works setting forth the general principles of immunology include S. Sell, 1996, Immunology, Immunopathology & Immunity, 5th Ed., Appleton & Lange, Publ., Stamford, Conn.; D. Male et al., 1996, Advanced Immunology, 3d Ed., Times Mirror Intl Publishers Ltd., Publ., London; D. P. Stites and A. L Terr, 1991, Basic and Clinical Immunology, 7th Ed., Appleton & Lange, Publ., Norwalk, Conn.; and A. K. Abbas et al., 1991, Cellular and Molecular Immunology, W. B. Saunders Co., Publ., Philadelphia, Pa. Any suitable materials and/or methods known to those of skill can be utilized in carrying out the present invention; however, preferred materials and/or methods are described. Materials, reagents, and the like to which reference is made in the following description and examples are generally obtainable from commercial sources, and specific vendors are cited herein.

### DETAILED DESCRIPTION OF THE INVENTION

### General Description of Crohn's Disease

[0065] Inflammatory Bowel Disease (IBD) is characterized by excessive and chronic inflammation at various sites in the gastro-intestinal tract. IBD describes two clinical conditions called Crohn's disease (Crohn disease) and ulcerative colitis (UC). Crohn disease and UC share many clinical and pathological characteristics but they also have some markedly different features. There is strong scientific support suggesting that the main pathological processes in these two diseases are distinct. This patent application will focus primarily on Crohn's disease.

[0066] The United Kingdom, northern Europe, and North America have been reported to have the highest incidence rates and prevalence for Crohn disease. In North America, prevalence for Crohn disease ranges between 0.03% and 0.2%. However, reports of increasing incidence and prevalence from other areas of the world have been published over the past 30 years (reviewed in Loftus 2004). Crohn disease may occur in people of all ages, but it is most commonly diagnosed in late adolescence and early adulthood (reviewed in Andres and Friedman 1999). Any part of the gastrointestinal tract can be affected in Crohn disease, from the mouth to the anus, and patches of inflammation occur, interspersed with healthy tissue.

[0067] Most Crohn disease patients experience characteristic periods of remission and flare-ups of the disease, often-requiring long-term medication, and/or hospitalization and surgery. The symptoms and complications of Crohn's disease differ, depending on what part of the intestinal tract is inflamed. The severity of the disease does not correlate directly with the extent of bowel involvement. It is the disease pattern that is most important in determining the disease course and the nature of the associated complications. Thus, Crohn disease can be subdivided into 3 types: predominantly inflammatory Crohn disease, non-perforating Crohn disease (presence of strictures), or perforating Crohn disease (presence of fistulas and/or abscesses) (reviewed in Andres and Friedman 1999).

[0068] Crohn disease symptoms include chronic diarrhea, abdominal pain, cramping, anorexia, and weight loss. Systemic features include fatigue, tachycardia and pyrexia. Chronic or acute blood loss in the bowel may result in anemia and even shock. The most common complication of Crohn disease is the presence of strictures (obstruction) of the intestine due to swelling and the formation of scar tissue. Another complication involves sores or ulcers within the intestinal tract. Sometimes these deep ulcers turn into tracts called fistulas that connect different parts of the intestine. These fistulas often become infected and occasionally form an abscess. Extra-intestinal inflammatory manifestations can occur in joints, eyes, skin, mouth, and liver in patients with either forms of IBD (reviewed in Andres and Friedman 1999). Crohn disease patients also carry several risk factors for the development of osteoporosis such as calcium and vitamin D deficiency, and corticosteroid use (Tremaine 2003). Patients with Crohn disease are also at increased risk of cancer of both the small and the large intestine (reviewed in Andres and Friedman 1999). Crohn disease is associated with an increased mortality rate relative to the general population and independent of whether the small intestine, large intestine, or both are affected. The excess of mortality is most notable in the first few years after diagnosis and is most often attributable to complications of Crohn disease, including colorectal cancer as well as other gastrointestinal complications (reviewed in Andres and Friedman 1999). Crohn disease is a lifelong disease that causes symptoms that may interfere with social activities, interpersonal relationships, and employment. Impairment relates to disease severity, pattern and side-effects of medication, the possibility of surgery, but also to age, other demographic factors and co-morbid medical conditions, including depression and anxiety (Irvine 2004).

[0069] There is no single definitive test for the diagnosis of Crohn disease. To determine the diagnosis, physicians evaluate a combination of information from the history and physical examination of a patient and from results of endoscopic, radiologic and histologic (blood and tissue) tests. Endoscopy with biopsy is the cornerstone for diagnosing and evaluating disease activity in Crohn disease. Radiology tests are used together with endoscopy to help evaluate the small bowel and look at the entire abdomen for infections, strictures, obstructions, and fistulas. Because Crohn disease often mimics other conditions and symptoms may vary widely, it may take some time to confirm the diagnosis.

[0070] Because there is no cure for Crohn disease, the goal of medical treatment is to suppress the inflammatory response and alleviate the symptoms by decreasing the frequency of disease flare-ups and maintaining remissions. Non-surgical treatment for active disease involves the use of anti-inflammatory (aminosalicylates and corticosteroids), antimicrobial (antibiotics), and immunomodulatory agents to control symptoms and reduce disease activity. The biologic therapies are targeted towards specific disease mechanisms and have the potential to provide more effective and safe treatments for human diseases. Infliximab (Remicade®) is a chimeric monoclonal antibody against TNFalpha, and the first biologic therapy that was approved for Crohn disease. Several novel genetically engineered drugs targeting specific sites in the inflammatory cascade are likely to have an impact in the near future. Among them, anti-inflammatory cytokines (recombinant IL-10 and IL-11), antibodies (humanized IgG4, anti-TNFalpha, anti-alpha4-integrin) and antisense therapies (ICAM-1) are currently being evaluated in Crohn disease treatment (Sandborn and Faubion 2004).

[0071] The frequency of indications for surgery parallels the frequency of local intestinal complications of the disease. Surgery is never curative for Crohn disease because the disease frequently recurs at or near the site of surgery; its overall goal is to conserve bowel and return the individual to the best possible quality of life. Up to 74% of all patients eventually require surgical intervention for their disease (Farmer 1985), and nearly 30% of patients require surgery within the first year of diagnosis (Podolsky 1991).

[0072] Although the etiology of Crohn disease is poorly understood, studies indicate that Crohn disease pathogenesis is the result of the complex interaction between environmental factors (i.e. gut micro-flora), genetic susceptibility, and the immune system. It has been proposed that IBD results from a dys-regulated mucosal immune response to the intestinal micro-flora in genetically susceptible individuals. The inappropriate activation of the mucosal immune system observed in Crohn disease has been linked to a loss of tolerance to gut commensals. It also appears that the loss of mucosal integrity leading to translocation of bacteria in the bowel wall is a crucial step for the propagation of the inflammatory process. However, it is not known whether barrier function is first compromised by intrinsic defects in epithelial integrity, by infection with enteric pathogens, or by loss of commensal-dependent signals necessary to maintain the physical integrity of the epithelium and hypo-responsiveness of the mucosal immune system (reviewed in Bouma and Strober 2003).

[0073] Familial aggregation, twin studies and consistent ethnic differences in disease frequency have strongly supported the important role of genetic factors in the cause of Crohn disease (reviewed in Andres and Friedman 1999). However, the incomplete concordance for Crohn disease within monozygotic twins, the phenotypic variations and the observed familial pattern of non-Mendelian inheritance suggest that Crohn disease has a complex genetic basis with many contributing genes. These facts also underline the presence and importance of environmental factors in the pathogenesis of this disease, such as gut micro-flora as mentioned above, and cigarette smoking which is the best known environmental factor for Crohn disease (reviewed in Andres and Friedman 1999). In addition, disease heterogeneity in the phenotype (location, age of onset, number and types of surgery, behavior, extra-intestinal manifestations, response to class of medications) can reflect extensive genetic heterogeneity.

[0074] Many common diseases, like Crohn's disease, are complex genetic traits and are believed to involve several disease-genes rather than single genes, as is observed for rare diseases. This makes detection of any particular gene substantially more difficult than in a rare disease, where a single gene mutation that segregates according to a Mendelian inheritance pattern is the causative mutation. Any one of the multiple interacting gene mutations involved in the etiology of a complex disease will impart a lower relative risk for the disease than will the single gene mutation involved in a simple genetic disease. Low relative risk alleles are more difficult to detect and, as a result, the success of positional cloning using linkage mapping that was achieved for simple genetic disease genes has not been repeated for complex diseases.

[0075] Several approaches have been proposed to discover and characterize multiple genes in complex genetic traits. Genome-wide scans (GWS) have been shown to be efficient in identifying Crohn's disease susceptibility genes (NOD2/CARD15 and OCTN). Gene variants associated with Crohn disease have been reported for CARD15, SCL22A4/5 within the 5q31 haplotype, DLG5, MDR-1 and TNFSF15. The most consistent replication and the clearest functional data are available for the CARD15 gene. However, the genetic risk for Crohn disease has not yet been fully resolved. In view of its incomplete characterisation, more experiments are warranted to better understand the heritable basis of Crohn disease. Current technologies applied in the genetic epidemiology of complex disorders include systematic genome-wide linkage disequilibrium (LD)-based association scans and the analysis of coding SNPs (cSNPs) in candidate genes or gene regions, both of which have been successful employed, for instance, in the context of obesity and type I diabetes. Since even high-density LD-based mapping approaches are not capable of fully unraveling the genetic basis of a given disorder, genome-wide cSNP studies appear to be a meaningful accompaniment to the GWS approach, allowing a direct definition of susceptibility variants with a functional implication. In some respects, cSNP scans are more hypothesis-driven than LD-based approaches using non-coding SNPs so that the former may offer several advantages, for instance, in terms of a smaller number of statistical tests required to identify disease associations that are also easier to interpret.

[0076] The present invention reports the results of a genome-wide disease association analysis of 19,779 non-synonymous SNPs, and the GWS analysis on other populations, such as the Quebec Founder population (QFP) samples, that were performed in search for new susceptibility variants for Crohn disease.

[0077] A coding SNP in the ATG16L1 (‘autophagy 16-like’) gene was identified, which is significantly associated with an increased susceptibility for Crohn disease in different populations and which interacts statistically with variants in the known disease gene CARD15.

[0078] In view of the foregoing, identifying susceptibility genes and polymorphisms associated with Crohn's disease and their respective biochemical pathways will facilitate the identification of diagnostic markers as well as novel targets for improved therapeutics. It will also improve the quality of life for those afflicted by this disease and will reduce the economic costs of these afflictions at the individual and societal level. The identification of those genetic markers would provide the basis for novel genetic tests and eliminate or reduce the therapeutic methods currently used. The identification of those genetic markers will also provide the development of effective therapeutic intervention for the battery of laboratory, radiological, and endoscopic evaluations typically required to diagnose Crohn's disease. The present invention satisfies this need and provides related advantages as well.

Genome Wide Association Study to Identify Genes Associated with Crohn's Disease

[0079] The present invention is based on the discovery of genes associated with Crohn's disease. In the preferred embodiment, disease-associated loci (candidate region 1; Table 1) is identified by the statistically significant differences in allele or haplotype frequencies between the cases and the controls.

[0080] The invention also provides a method for the discovery of genes associated with Crohn's disease, comprising the following steps (see Example section herein):

Step 1: Recruit patients (cases) and controls
Step 2: DNA extraction and quantitation
Step 3: Genotype the recruited individuals
Step 4: Perform the genetic analysis on the results obtained
Step 5: Functional characterization of the associated genetic markers to identify causative polymorphisms

### The ATG16L1 Gene

[0081] A new susceptibility variant for Crohn disease (CD), in the ATG16L1 gene is identified in the present invention. Its disease association was also replicated in independent German, QFP and UK samples.

[0082] In addition, a statistical interaction between rs2241880 (the variant found associated in the ATG16L1 gene) and the established CARD15 disease mutations was noted (Table 10). Such interaction reflects a potential functional connection between the two encoded proteins at the molecular level.

[0083] In one embodiment, both rs2241880 and CARD15 mutations are associated with Crohn disease state and are functionally connected.

[0084] In another embodiment, rs2241880 alone is associated with Crohn disease state.

[0085] Both proteins are part of molecular pathways participating in the innate immune defence against intracellular bacteria. Bacteria that are able to invade the cytoplasm of host cells are recognized by the innate immune system. Proteins from then NLR (NACHT/LRR or NOD-like receptors) family recognize pathogen-associated molecular patterns (e.g. peptidoglycan) and lead to the activation of the innate immune defense. In particular, NOD2, the protein encoded by CARD15, plays a pivotal role in the detection of cytosolic Muramyl-Dipeptide (MurNAc-L-Ala-D-isoGln; MDP), a fragment of the bacterial cell wall. Autophagy is a fundamental molecular machinery of eukaryotes for bulk protein degradation. It has been implicated in diverse physiological processes such as organelle turnover, starvation response, cell death and defence against invading bacteria. Pathogens trapped by the autophagic membrane are ultimately targeted to the autolysosome compartment.

[0086] The ATG16L1 protein is part of this autophagosome pathway. Since variations in both CARD15 and ATG16L1 are not associated with ulcerative colitis, we hypothesize that genetic defects in the innate immune response against intracellular bacteria may be specific for Crohn disease.

[0087] The disease-associated variant rs2241880 leads to an amino acid exchange (Thr to Ala) at position 300 of the N-terminus of the WD-repeat domain in ATG16L1. The interaction partner of the WD domain in ATG16L1 has not yet been identified experimentally. It is clear, however, that the ATG12-ATG5 conjugate, which is required for autophagy, assembles in a multimeric complex with the coiled-coils protein ATG16. ATG16 interacts with the conjugate through ATG5, and ATG16 homooligomers formed by the coiled-coils connect multiple ATG12-ATG5 conjugates. Furthermore, it has been shown that the ATG12-ATG5ATG16 complex is necessary for autophagosome formation and localizes to the so-called preautophagosomal structure. In metazoans, yeast ATG16 is known as ATG16-like protein 1 (ATG16L1) because it contains an additional WD-repeat domain of as yet unidentified function at the C-terminus. In most WD-repeat proteins, seven or eight copies of the WD-repeat form a β-propeller domain structure with blades consisting of four-stranded anti-parallel β-sheets. Due to the circular arrangement of the propeller blades, the N-terminal strand β1 is included in the C-terminal blade, and this stable β-propeller structure provides an extensive surface for molecular interactions. These interactions may be impaired by the conformational change resulting from the T300A substitution.

[0088] Importantly, the association of a ATG16L1 variant with the disease and its interaction with CARD15 genotype support the emerging concept of Crohn disease as an inflammatory barrier disorder with a dysfunctional response to luminal bacterial content, and adds a new dimension because the autophagosome is now etiologically implicated.

[0089] The characterisation of rs2241880 as a disease variant for Crohn disease also supports the existing view of a strong link between autophagy and intracellular bacterial recognition molecules, such as CARD15. We therefore think that the findings presented here contribute to a better understanding of the aetiology of Crohn disease and, at the same time, stimulate the cell biological exploration of host-bacterial interaction.

### Nucleic Acid Sequences

[0090] The nucleic acid sequences of the present invention may be derived from a variety of sources including DNA, cDNA, synthetic DNA, synthetic RNA, derivatives, mimetics or combinations thereof. Such sequences may comprise genomic DNA, which may or may not include naturally occurring introns, genic regions, nongenic regions, and regulatory regions. Moreover, such genomic DNA may be obtained in association with promoter regions or poly (A) sequences. The sequences, genomic DNA, or cDNA may be obtained in any of several ways. Genomic DNA can be extracted and purified from suitable cells by means well known in the art. Alternatively, mRNA can be isolated from a cell and used to produce cDNA by reverse transcription or other means. The nucleic acids described herein are used in certain embodiments of the methods of the present invention for production of RNA, proteins or polypeptides, through incorporation into cells, tissues, or organisms. In one embodiment, DNA containing all or part of the coding sequence for the genes described in Tables 4-5, or the SNP markers described in Tables 2, 3 and 7-10, is incorporated into a vector for expression of the encoded polypeptide in suitable host cells. The invention also comprises the use of the nucleotide sequence of the nucleic acids of this invention to identify DNA probes for the genes described in Tables 4-6 or the SNP markers described in Tables 2, 3 and 7-10, PCR primers to amplify the genes described in Tables 4-6 or the SNP markers described in Tables 2, 3 and 7-10, nucleotide polymorphisms in the genes described in Tables 4-6, and regulatory elements of the genes described in Tables 4-6. The nucleic acids of the present invention find use as primers and templates for the recombinant production of Crohn's disease-associated peptides or polypeptides, for chromosome and gene mapping, to provide antisense sequences, for tissue distribution studies, to locate and obtain full length genes, to identify and obtain homologous sequences (wild-type and mutants), and in diagnostic applications.

### Antisense Oligonucleotides

[0091] In a particular embodiment of the invention, an antisense nucleic acid or oligonucleotide is wholly or partially complementary to, and can hybridize with, a target nucleic acid (either DNA or RNA) having the sequence of SEQ ID NO:1, NO:3 or any SEQ ID from any Tables of the invention. For example, an antisense nucleic acid or oligonucleotide comprising 16 nucleotides can be sufficient to inhibit expression of at least one gene from Tables 4-6. Alternatively, an antisense nucleic acid or oligonucleotide can be complementary to 5′ or 3′ untranslated regions, or can overlap the translation initiation codon (5′ untranslated and translated regions) of at least one gene from Tables 4-6, or its functional equivalent. In another embodiment, the antisense nucleic acid is wholly or partially complementary to, and can hybridize with, a target nucleic acid that encodes a polypeptide from a gene described in Tables 4-6.

[0092] In addition, oligonucleotides can be constructed which will bind to duplex nucleic acid (i.e., DNA:DNA or DNA:RNA), to form a stable triple helix containing or triplex nucleic acid. Such triplex oligonucleotides can inhibit transcription and/or expression of a gene from Tables 4-6, or its functional equivalent (M. D. Frank-Kamenetskii et al., 1995). Triplex oligonucleotides are constructed using the basepairing rules of triple helix formation and the nucleotide sequence of the genes described in Tables 4-6.

[0093] The present invention encompasses methods of using oligonucleotides in antisense inhibition of the function of the genes from Tables 4-6. In the context of this invention, the term “oligonucleotide” refers to naturally-occurring species or synthetic species formed from naturally-occurring subunits or their close homologs. The term may also refer to moieties that function similarly to oligonucleotides, but have non-naturally-occurring portions. Thus, oligonucleotides may have altered sugar moieties or inter-sugar linkages. Exemplary among these are phosphorothioate and other sulfur containing species which are known in the art. In preferred embodiments, at least one of the phosphodiester bonds of the oligonucleotide has been substituted with a structure that functions to enhance the ability of the compositions to penetrate into the region of cells where the RNA whose activity is to be modulated is located. It is preferred that such substitutions comprise phosphorothioate bonds, methyl phosphonate bonds, or short chain alkyl or cycloalkyl structures. In accordance with other preferred embodiments, the phosphodiester bonds are substituted with structures which are, at once, substantially non-ionic and non-chiral, or with structures which are chiral and enantiomerically specific. Persons of ordinary skill in the art will be able to select other linkages for use in the practice of the invention. Oligonucleotides may also include species that include at least some modified base forms. Thus, purines and pyrimidines other than those normally found in nature may be so employed. Similarly, modifications on the furanosyl portions of the nucleotide subunits may also be effected, as long as the essential tenets of this invention are adhered to. Examples of such modifications are 2′-O-alkyl- and 2′-halogen-substituted nucleotides. Some non-limiting examples of modifications at the 2′ position of sugar moieties which are useful in the present invention include OH, SH, SCH3, F, OCH3, OCN, O(CH2), NH2 and O(CH2)n CH3, where n is from 1 to about 10. Such oligonucleotides are functionally interchangeable with natural oligonucleotides or synthesized oligonucleotides, which have one or more differences from the natural structure. All such analogs are comprehended by this invention so long as they function effectively to hybridize with at least one gene from Tables 4-6 DNA or RNA to inhibit the function thereof.

[0094] The oligonucleotides in accordance with this invention preferably comprise from about 3 to about 50 subunits. It is more preferred that such oligonucleotides and analogs comprise from about 8 to about 25 subunits and still more preferred to have from about 12 to about 20 subunits. As defined herein, a “subunit” is a base and sugar combination suitably bound to adjacent subunits through phosphodiester or other bonds. Antisense nucleic acids or oligonucleotides can be produced by standard techniques (see, e.g., Shewmaker et al., U.S. Pat. No. 6,107,065). The oligonucleotides used in accordance with this invention may be conveniently and routinely made through the well-known technique of solid phase synthesis. Any other means for such synthesis may also be employed; however, the actual synthesis of the oligonucleotides is well within the abilities of the practitioner. It is also well known to prepare other oligonucleotides such as phosphorothioates and alkylated derivatives.

[0095] The oligonucleotides of this invention are designed to be hybridizable with RNA (e.g., mRNA) or DNA from genes described in Tables 4-6. For example, an oligonucleotide (e.g., DNA oligonucleotide) that hybridizes to mRNA from a gene described in Tables 4-6 can be used to target the mRNA for RnaseH digestion. Alternatively an oligonucleotide that can hybridize to the translation initiation site of the mRNA of a gene described in Tables 4-6 can be used to prevent translation of the mRNA. In another approach, oligonucleotides that bind to the double-stranded DNA of a gene from Tables 4-6 can be administered. Such oligonucleotides can form a triplex construct and inhibit the transcription of the DNA encoding polypeptides of the genes described in Tables 4-6. Triple helix pairing prevents the double helix from opening sufficiently to allow the binding of polymerases, transcription factors, or regulatory molecules. Recent therapeutic advances using triplex DNA have been described (see, e.g., J. E. Gee et al., 1994, Molecular and Immunologic Approaches, Futura Publishing Co., Mt. Kisco, N.Y.).

[0096] As non-limiting examples, antisense oligonucleotides may be targeted to hybridize to the following regions: mRNA cap region; translation initiation site; translational termination site; transcription initiation site; transcription termination site; polyadenylation signal; 3′ untranslated region; 5′ untranslated region; 5′ coding region; mid coding region; and 3′ coding region. Preferably, the complementary oligonucleotide is designed to hybridize to the most unique 5′ sequence of a gene described in Tables 4-6, including any of about 15-35 nucleotides spanning the 5′ coding sequence. In accordance with the present invention, the antisense oligonucleotide can be synthesized, formulated as a pharmaceutical composition, and administered to a subject. The synthesis and utilization of antisense and triplex oligonucleotides have been previously described (e.g., Simon et al., 1999; Barre et al., 2000; Elez et al., 2000; Sauter et al., 2000).

[0097] Alternatively, expression vectors derived from retroviruses, adenovirus, herpes or vaccinia viruses or from various bacterial plasmids may be used for delivery of nucleotide sequences to the targeted organ, tissue or cell population. Methods which are well known to those skilled in the art can be used to construct recombinant vectors which will express nucleic acid sequence that is complementary to the nucleic acid sequence encoding a polypeptide from the genes described in Tables 4-6. These techniques are described both in Sambrook et al., 1989 and in Ausubel et al., 1992. For example, expression of at least one gene from Tables 4-6 can be inhibited by transforming a cell or tissue with an expression vector that expresses high levels of untranslatable sense or antisense sequences. Even in the absence of integration into the DNA, such vectors may continue to transcribe RNA molecules until they are disabled by endogenous nucleases. Transient expression may last for a month or more with a nonreplicating vector, and even longer if appropriate replication elements are included in the vector system. Various assays may be used to test the ability of gene-specific antisense oligonucleotides to inhibit the expression of at least one gene from Tables 4-6. For example, mRNA levels of the genes described in Tables 4-6 can be assessed by Northern blot analysis (Sambrook et al., 1989; Ausubel et al., 1992; J. C. Alwine et al. 1977; I. M. Bird, 1998), quantitative or semi-quantitative RT-PCR analysis (see, e.g., W. M. Freeman et al., 1999; Ren et al., 1998; J. M. Cale et al., 1998), or in situ hybridization (reviewed by A. K. Raap, 1998). Alternatively, antisense oligonucleotides may be assessed by measuring levels of the polypeptide from the genes described in Tables 4-6, e.g., by western blot analysis, indirect immunofluorescence and immunoprecipitation techniques (see, e.g., J. M. Walker, 1998, Protein Protocols on Crohn disease-ROM, Humana Press, Totowa, N.J.). Any other means for such detection may also be employed, and is well within the abilities of the practitioner.

Methods to Identify Agents that Modulate the Expression of a Nucleic Acid Encoding a Gene Involved in Crohn's Disease.

[0098] The present invention provides methods for identifying agents that modulate the expression of a nucleic acid encoding a gene from Tables 4-6. Such methods may utilize any available means of monitoring for changes in the expression level of the nucleic acids of the invention. As used herein, an agent is said to modulate the expression of a nucleic acid of the invention if it is capable of up- or down-regulating expression of the nucleic acid in a cell. Such cells can be obtained from any parts of the body such as the GI track, colon, esophagus, stomach, rectum, jujenum, ileum, mucosa, submucosa, cecum, rectum, scalp, blood, dermis, epidermis, skin cells, cutaneous surfaces, intertrigious areas, genitalia, vessels and endothelium. Some non-limiting examples of cells that can be used are: muscle cells, nervous cells, blood and vessels cells, dermis, epidermis and other skin cells, T cell, mast cell, Crohn disease4+ lymphocyte, monocyte, macrophage, synovial cell, glial cell, villous intestinal cell, neutrophilic granulocyte, eosinophilic granulocyte, keratinocyte, lamina propria lymphocyte, intraepithelial lymphocyte, epithelial cells and lymphocytes.

[0099] In one assay format, the expression of a nucleic acid encoding a gene of the invention (see Tables 4-6) in a cell or tissue sample is monitored directly by hybridization to the nucleic acids of the invention. Cell lines or tissues are exposed to the agent to be tested under appropriate conditions and time and total RNA or mRNA is isolated by standard procedures such as those disclosed in Sambrook et al., (1989) Molecular Cloning: A Laboratory Manual, Cold Spring Harbor Laboratory Press).

[0100] Probes to detect differences in RNA expression levels between cells exposed to the agent and control cells may be prepared as described above. Hybridization conditions are modified using known methods, such as those described by Sambrook et al., and Ausubel et al., as required for each probe. Hybridization of total cellular RNA or RNA enriched for polyA RNA can be accomplished in any available format. For instance, total cellular RNA or RNA enriched for polyA RNA can be affixed to a solid support and the solid support exposed to at least one probe comprising at least one, or part of one of the sequences of the invention under conditions in which the probe will specifically hybridize. Alternatively, nucleic acid fragments comprising at least one, or part of one of the sequences of the invention can be affixed to a solid support, such as a silicon chip or a porous glass wafer. The chip or wafer can then be exposed to total cellular RNA or polyA RNA from a sample under conditions in which the affixed sequences will specifically hybridize to the RNA. By examining for the ability of a given probe to specifically hybridize to an RNA sample from an untreated cell population and from a cell population exposed to the agent, agents which up or down regulate expression are identified.

Methods to Identify Agents that Modulate the Activity of a Protein Encoded by a Gene Involved in Crohn's Disease.

[0101] The present invention provides methods for identifying agents that modulate at least one activity of the proteins described in Tables 4-6. Such methods may utilize any means of monitoring or detecting the desired activity. As used herein, an agent is said to modulate the expression of a protein of the invention if it is capable of up- or down-regulating expression of the protein in a cell. Such cells can be obtained from any parts of the body such as the GI track, colon, esophagus, stomach, rectum, jujenum, ileum, mucosa, submucosa, cecum, rectum, scalp, blood, dermis, epidermis, skin cells, cutaneous surfaces, intertrigious areas, genitalia, vessels and endothelium. Some non-limiting examples of cells that can be used are: muscle cells, nervous cells, blood and vessels cells, dermis, epidermis and other skin cells, T cell, mast cell, Crohn disease4+ lymphocyte, monocyte, macrophage, synovial cell, glial cell, villous intestinal cell, neutrophilic granulocyte, eosinophilic granulocyte, keratinocyte, lamina propria lymphocyte, intraepithelial lymphocyte, epithelial cells and lymphocytes.

[0102] In one format, the specific activity of a protein of the invention, normalized to a standard unit, may be assayed in a cell population that has been exposed to the agent to be tested and compared to an unexposed control cell population may be assayed. Cell lines or populations are exposed to the agent to be tested under appropriate conditions and times. Cellular lysates may be prepared from the exposed cell line or population and a control, unexposed cell line or population. The cellular lysates are then analyzed with the probe.

[0103] Antibody probes can be prepared by immunizing suitable mammalian hosts utilizing appropriate immunization protocols using the proteins of the invention or antigen-containing fragments thereof. To enhance immunogenicity, these proteins or fragments can be conjugated to suitable carriers. Methods for preparing immunogenic conjugates with carriers such as BSA, KLH or other carrier proteins are well known in the art. In some circumstances, direct conjugation using, for example, carbodiimide reagents may be effective; in other instances linking reagents such as those supplied by Pierce Chemical Co. (Rockford, Ill.) may be desirable to provide accessibility to the hapten. The hapten peptides can be extended at either the amino or carboxy terminus with a cysteine residue or interspersed with cysteine residues, for example, to facilitate linking to a carrier. Administration of the immunogens is conducted generally by injection over a suitable time period and with use of suitable adjuvants, as is generally understood in the art. During the immunization schedule, titers of antibodies are taken to determine adequacy of antibody formation. While the polyclonal antisera produced in this way may be satisfactory for some applications, for pharmaceutical compositions, use of monoclonal preparations is preferred. Immortalized cell lines which secrete the desired monoclonal antibodies may be prepared using standard methods, see e.g., Kohler & Milstein (1992) or modifications which affect immortalization of lymphocytes or spleen cells, as is generally known. The immortalized cell lines secreting the desired antibodies can be screened by immunoassay in which the antigen is the peptide hapten, polypeptide or protein. When the appropriate immortalized cell culture secreting the desired antibody is identified, the cells can be cultured either in vitro or by production in ascites fluid. The desired monoclonal antibodies may be recovered from the culture supernatant or from the ascites supernatant. Fragments of the monoclonal antibodies or the polyclonal antisera which contain the immunologically significant portion(s) can be used as antagonists, as well as the intact antibodies. Use of immunologically reactive fragments, such as Fab or Fab′ fragments, is often preferable, especially in a therapeutic context, as these fragments are generally less immunogenic than the whole immunoglobulin. The antibodies or fragments may also be produced, using current technology, by recombinant means. Antibody regions that bind specifically to the desired regions of the protein can also be produced in the context of chimeras derived from multiple species. Antibody regions that bind specifically to the desired regions of the protein can also be produced in the context of chimeras from multiple species, for instance, humanized antibodies. The antibody can therefore be a humanized antibody or a human antibody, as described in U.S. Pat. No. 5,585,089 or Riechmann et al. (1988).

[0104] Agents that are assayed in the above method can be randomly selected or rationally selected or designed. As used herein, an agent is said to be randomly selected when the agent is chosen randomly without considering the specific sequences involved in the association of the protein of the invention alone or with its associated substrates, binding partners, etc. An example of randomly selected agents is the use of a chemical library or a peptide combinatorial library, or a growth broth of an organism. As used herein, an agent is said to be rationally selected or designed when the agent is chosen on a non-random basis which takes into account the sequence of the target site or its conformation in connection with the agent's action. Agents can be rationally selected or rationally designed by utilizing the peptide sequences that make up these sites. For example, a rationally selected peptide agent can be a peptide whose amino acid sequence is identical to or a derivative of any functional consensus site. The agents of the present invention can be, as examples, oligonucleotides, antisense polynucleotides, interfering RNA, peptides, peptide mimetics, antibodies, antibody fragments, small molecules, vitamin derivatives, as well as carbohydrates. Peptide agents of the invention can be prepared using standard solid phase (or solution phase) peptide synthesis methods, as is known in the art. In addition, the DNA encoding these peptides may be synthesized using commercially available oligonucleotide synthesis instrumentation and produced recombinantly using standard recombinant production systems. The production using solid phase peptide synthesis is necessitated if non-gene-encoded amino acids are to be included.

[0105] Another class of agents of the present invention includes antibodies or fragments thereof that bind to a protein encoded by a gene in Tables 4-6. Antibody agents can be obtained by immunization of suitable mammalian subjects with peptides, containing as antigenic regions, those portions of the protein intended to be targeted by the antibodies (see section above of antibodies as probes for standard antibody preparation methodologies).

[0106] In yet another class of agents, the present invention includes peptide mimetics that mimic the three-dimensional structure of the protein encoded by a gene from Tables 4-6. Such peptide mimetics may have significant advantages over naturally occurring peptides, including, for example: more economical production, greater chemical stability, enhanced pharmacological properties (half-life, absorption, potency, efficacy, etc.), altered specificity (e.g., a broad-spectrum of biological activities), reduced antigenicity and others. In one form, mimetics are peptide-containing molecules that mimic elements of protein secondary structure. The underlying rationale behind the use of peptide mimetics is that the peptide backbone of proteins exists chiefly to orient amino acid side chains in such a way as to facilitate molecular interactions, such as those of antibody and antigen. A peptide mimetic is expected to permit molecular interactions similar to the natural molecule. In another form, peptide analogs are commonly used in the pharmaceutical industry as non-peptide drugs with properties analogous to those of the template peptide. These types of non-peptide compounds are also referred to as peptide mimetics or peptidomimetics (Fauchere, 1986; Veber & Freidinger, 1985; Evans et al., 1987) which are usually developed with the aid of computerized molecular modeling. Peptide mimetics that are structurally similar to therapeutically useful peptides may be used to produce an equivalent therapeutic or prophylactic effect. Generally, peptide mimetics are structurally similar to a paradigm polypeptide (i.e., a polypeptide that has a biochemical property or pharmacological activity), but have one or more peptide linkages optionally replaced by a linkage using methods known in the art. Labeling of peptide mimetics usually involves covalent attachment of one or more labels, directly or through a spacer (e.g., an amide group), to non-interfering position(s) on the peptide mimetic that are predicted by quantitative structure-activity data and molecular modeling. Such non-interfering positions generally are positions that do not form direct contacts with the macromolecule(s) to which the peptide mimetic binds to produce the therapeutic effect. Derivitization (e.g., labeling) of peptide mimetics should not substantially interfere with the desired biological or pharmacological activity of the peptide mimetic. The use of peptide mimetics can be enhanced through the use of combinatorial chemistry to create drug libraries. The design of peptide mimetics can be aided by identifying amino acid mutations that increase or decrease binding of the protein to its binding partners. Approaches that can be used include the yeast two hybrid method (see Chien et al., 1991) and the phage display method. The two hybrid method detects protein-protein interactions in yeast (Fields et al., 1989). The phage display method detects the interaction between an immobilized protein and a protein that is expressed on the surface of phages such as lambda and M13 (Amberg et al., 1993; Hogrefe et al., 1993). These methods allow positive and negative selection for protein-protein interactions and the identification of the sequences that determine these interactions.

### Method to Diagnose Crohn's Disease

[0107] The present invention also relates to methods for diagnosing inflammatory bowel disease or a related disease, preferably Crohn's disease (Crohn disease), a disposition to such disease, predisposition to such a disease and/or disease progression. In some methods, the steps comprise contacting a target sample with (a) nucleic acid molecule(s) or fragments thereof and comparing the concentration of individual mRNA(s) with the concentration of the corresponding mRNA(s) from at least one healthy donor. An aberrant (increased or decreased) mRNA level of at least one gene from Tables 4-6, or at least 5 or 10 genes from Tables 4-6, determined in the sample in comparison to the control sample is an indication of Crohn's disease or a related disease or a disposition to such kinds of diseases. For diagnosis, samples are, preferably, obtained from inflamed colon tissue. Samples can also be obtained from any parts of the body such as the GI track, colon, esophagus, stomach, rectum, jujenum, ileum, mucosa, submucosa, cecum, rectum, scalp, blood, dermis, epidermis, skin cells, cutaneous surfaces, intertrigious areas, genitalia, vessels and endothelium. Some non-limiting examples of cells that can be used are: muscle cells, nervous cells, blood and vessels cells, dermis, epidermis and other skin cells, T cell, mast cell, Crohn disease4+ lymphocyte, monocyte, macrophage, synovial cell, glial cell, villous intestinal cell, neutrophilic granulocyte, eosinophilic granulocyte, keratinocyte, lamina propria lymphocyte, intraepithelial lymphocyte, epithelial cells and lymphocytes.

[0108] For analysis of gene expression, total RNA is obtained from cells according to standard procedures and, preferably, reverse-transcribed. Preferably, a DNAse treatment (in order to get rid of contaminating genomic DNA) is performed. Some non-limiting examples of cells that can be used are: muscle cells, nervous cells, blood and vessels cells, dermis, epidermis and other skin cells, T cell, mast cell, Crohn disease4+ lymphocyte, monocyte, macrophage, synovial cell, glial cell, villous intestinal cell, neutrophilic granulocyte, eosinophilic granulocyte, keratinocyte, lamina propria lymphocyte, intraepithelial lymphocyte, epithelial cells and lymphocytes.

[0109] The nucleic acid molecule or fragment is typically a nucleic acid probe for hybridization or a primer for PCR. The person skilled in the art is in a position to design suitable nucleic acids probes based on the information provided in the Tables of the present invention. The target cellular component, i.e. mRNA, e.g., in colon tissue, may be detected directly in situ, e.g. by in situ hybridization or it may be isolated from other cell components by common methods known to those skilled in the art before contacting with a probe. Detection methods include Northern blot analysis, RNase protection, in situ methods, e.g. in situ hybridization, in vitro amplification methods (PCR, LCR, QRNA replicase or RNA-transcription/amplification (TAS, 3SR), reverse dot blot disclosed in EP-B10237362) and other detection assays that are known to those skilled in the art. Products obtained by in vitro amplification can be detected according to established methods, e.g. by separating the products on agarose or polyacrylamide gels and by subsequent staining with ethidium bromide. Alternatively, the amplified products can be detected by using labeled primers for amplification or labeled dNTPs. Preferably, detection is based on a microarray.

[0110] The probes (or primers) (or, alternatively, the reverse-transcribed sample mRNAs) can be detectably labeled, for example, with a radioisotope, a bioluminescent compound, a chemiluminescent compound, a fluorescent compound, a metal chelate, or an enzyme.

[0111] The present invention also relates to the use of the nucleic acid molecules or fragments described above for the preparation of a diagnostic composition for the diagnosis of Crohn's disease or a disposition to such a disease.

[0112] The present invention also relates to the use of the nucleic acid molecules of the present invention for the isolation or development of a compound which is useful for therapy of Crohn's disease. For example, the nucleic acid molecules of the invention and the data obtained using said nucleic acid molecules for diagnosis of Crohn's disease might allow for the identification of further genes which are specifically dysregulated, and thus may be considered as potential targets for therapeutic interventions.

[0113] The invention further provides prognostic assays that can be used to identify subjects having or at risk of developing Crohn's disease. In such method, a test sample is obtained from a subject and the amount and/or concentration of the nucleic acid described in Tables 4-6 is determined; wherein the presence of an associated allele, a particular allele of a polymorphic locus, or the likes in the nucleic acids sequences of this invention can be diagnostic for a subject having or at risk of developing Crohn's. As used herein, a “test sample” refers to a biological sample obtained from a subject of interest. For example, a test sample can be a biological fluid, a cell sample, or tissue. A biological fluid can be, but is not limited to saliva, serum, mucus, urine, stools, spermatozoids, vaginal secretions, lymph, amiotic liquid, pleural liquid and tears. Cells can be, but are not limited to: muscle cells, nervous cells, blood and vessels cells, dermis, epidermis and other skin cells, T cell, mast cell, Crohn disease4+ lymphocyte, monocyte, macrophage, synovial cell, glial cell, villous intestinal cell, neutrophilic granulocyte, eosinophilic granulocyte, keranocyte, lamina propria lymphocyte, intraephitelial lymphocyte, epithelial cells and lymphocytes.

[0114] Furthermore, the prognostic assays described herein can be used to determine whether a subject can be administered an agent (e.g., an agonist, antagonist, peptidomimetic, polypeptide, nucleic acid such as antisense DNA or interfering RNA (RNAi), small molecule or other drug candidate) to treat Crohn's disease. Specifically, these assays can be used to predict whether an individual will have an efficacious response or will experience adverse events in response to such an agent. For example, such methods can be used to determine whether a subject can be effectively treated with an agent that modulates the expression and/or activity of a gene from Tables 4-6 or the nucleic acids described herein. In another example, an association study may be performed to identify polymorphisms from Tables 2, 3 and 7-10 that are associated with a given response to the agent, e.g., an efficacious response or the likelihood of one or more adverse events. Thus, one embodiment of the present invention provides methods for determining whether a subject can be effectively treated with an agent for a disorder associated with aberrant expression or activity of a gene from Tables 4-6 in which a test sample is obtained and nucleic acids or polypeptides from Tables 4-6 are detected (e.g., wherein the presence of a particular level of expression of a gene from Tables 4-6 or a particular allelic variant of such gene, such as polymorphisms from Tables 2, 3 and 7-10 is diagnostic for a subject that can be administered an agent to treat a disorder such as Crohn's disease). In one embodiment, the method includes obtaining a sample from a subject suspected of having Crohn's disease or an affected individual and exposing such sample to an agent. The expression and/or activity of the nucleic acids and/or genes of the invention are monitored before and after treatment with such agent to assess the effect of such agent. After analysis of the expression values, one skilled in the art can determine whether such agent can effectively treat such subject. In another embodiment, the method includes obtaining a sample from a subject having or susceptible to developing Crohn's disease and determining the allelic constitution of polymorphisms from Tables 2, 3 and 7-10 that are associated with a particular response to an agent. After analysis of the allelic constitution of the individual at the associated polymorphisms, one skilled in the art can determine whether such agent can effectively treat such subject.

[0115] The methods of the invention can also be used to detect genetic alterations in a gene from Tables 4-6, thereby determining if a subject with the lesioned gene is at risk for a disorder associated with Crohn's disease. In preferred embodiments, the methods include detecting, in a sample of cells from the subject, the presence or absence of a genetic alteration characterized by at least one alteration linked to or affecting the integrity of a gene from Tables 4-6 encoding a polypeptide or the misexpression of such gene. For example, such genetic alterations can be detected by ascertaining the existence of at least one of: (1) a deletion of one or more nucleotides from a gene from Tables 4-6; (2) an addition of one or more nucleotides to a gene from Tables 4-6; (3) a substitution of one or more nucleotides of a gene from Tables 4-6; (4) a chromosomal rearrangement of a gene from Tables 4-6; (5) an alteration in the level of a messenger RNA transcript of a gene from Tables 4-6; (6) aberrant modification of a gene from Tables 4-6, such as of the methylation pattern of the genomic DNA, (7) the presence of a non-wild type splicing pattern of a messenger RNA transcript of a gene from Tables 4-6; (8) inappropriate post-translational modification of a polypeptide encoded by a gene from Tables 4-6; and (9) alternative promoter use. As described herein, there are a large number of assay techniques known in the art which can be used for detecting alterations in a gene from Tables 4-6. A preferred biological sample is a peripheral blood sample obtained by conventional means from a subject. Another preferred biological sample is a buccal swab. Other biological samples can be, but are not limited to, urine, stools, spermatozoids, vaginal secretions, lymph, amiotic liquid, pleural liquid and tears.

[0116] In certain embodiments, detection of the alteration involves the use of a probe/primer in a polymerase chain reaction (PCR) (see, e.g., U.S. Pat. Nos. 4,683,195 and 4,683,202), such as anchor PCR or RACE PCR, or alternatively, in a ligation chain reaction (LCR) (see, e.g., Landegran et al., 1988; and Nakazawa et al., 1994), the latter of which can be particularly useful for detecting point mutations in a gene from Tables 4-6 (see Abavaya et al., 1995). This method can include the steps of collecting a sample of cells from a patient, isolating nucleic acid (e.g., genomic DNA, mRNA, or both) from the cells of the sample, contacting the nucleic acid sample with one or more primers which specifically hybridize to a gene from Tables 4-6 under conditions such that hybridization and amplification of the nucleic acid from Tables 4-6 (if present) occurs, and detecting the presence or absence of an amplification product, or detecting the size of the amplification product and comparing the length to a control sample. PCR and/or LCR may be desirable to use as a preliminary amplification step in conjunction with some of the techniques used for detecting a mutation, an associated allele, a particular allele of a polymorphic locus, or the like described herein.

[0117] Alternative amplification methods include: self sustained sequence replication (Guatelli et al., 1990), transcriptional amplification system (Kwoh et al., 1989), Q-Beta Replicase (Lizardi et al., 1988), isothermal amplification (e.g. Dean et al., 2002); and Hafner et al., 2001), or any other nucleic acid amplification method, followed by the detection of the amplified molecules using techniques well known to those of ordinary skill in the art. These detection schemes are especially useful for the detection of nucleic acid molecules if such molecules are present in very low number.

[0118] In an alternative embodiment, alterations in a gene from Tables 4-6, from a sample cell can be identified by identifying changes in a restriction enzyme cleavage pattern. For example, sample and control DNA is isolated, amplified (optionally), digested with one or more restriction endonucleases, and fragment length sizes are determined by gel electrophoresis and compared. Differences in fragment length sizes between sample and control DNA indicate a mutation(s), an associated allele, a particular allele of a polymorphic locus, or the like in the sample DNA. Moreover, sequence specific ribozymes (see, e.g., U.S. Pat. No. 5,498,531 or DNAzyme e.g. U.S. Pat. No. 5,807,718) can be used to score for the presence of specific associated allele, a particular allele of a polymorphic locus, or the likes by development or loss of a ribozyme or DNAzyme cleavage site.

[0119] The present invention also relates to further methods for diagnosing Crohn's disease, a disposition to such disorder, predisposition to such a disorder and/or disorder progression. In some methods, the steps comprise contacting a target sample with (a) nucleic molecule(s) or fragments thereof and determining the presence or absence of a particular allele of a polymorphism that confers a disorder-related phenotype (e.g., predisposition to such a disorder and/or disorder progression). The presence of at least one allele from Tables 2, 3 and 7-10 that is associated with Crohn's disease (“associated allele”), at least 5 or 10 associated alleles from Tables 2, 3 and 7-10, at least 50 associated alleles from Tables 2, 3 and 7-10 at least 100 associated alleles from Table Tables 2, 3 and 7-10, or at least 200 associated alleles from Table Tables 2, 3 and 7-10 determined in the sample is an indication of Crohn's disease, a disposition or predisposition to such kinds of disorders, or a prognosis for such disorder progression. Samples may be obtained from any parts of the body such as the GI track, colon, esophagus, stomach, rectum, jujenum, ileum, mucosa, submucosa, cecum, rectum, scalp, blood, dermis, epidermis, skin cells, cutaneous surfaces, intertrigious areas, genitalia, vessels and endothelium. Some non-limiting examples of cells that can be used are: muscle cells, nervous cells, blood and vessels cells, dermis, epidermis and other skin cells, T cell, mast cell, Crohn disease4+ lymphocyte, monocyte, macrophage, synovial cell, glial cell, villous intestinal cell, neutrophilic granulocyte, eosinophilic granulocyte, keratinocyte, lamina propria lymphocyte, intraepithelial lymphocyte, epithelial cells and lymphocytes.

[0120] In other embodiments, alterations in a gene from Tables 4-6 can be identified by hybridizing sample and control nucleic acids, e.g., DNA or RNA, to high density arrays or bead arrays containing tens to thousands of oligonucleotide probes (Cronin et al., 1996; Kozal et al., 1996). For example, alterations in a gene from Tables 4-6 can be identified in two dimensional arrays containing light-generated DNA probes as described in Cronin et al., (1996). Briefly, a first hybridization array of probes can be used to scan through long stretches of DNA in a sample and control to identify base changes between the sequences by making linear arrays of sequential overlapping probes. This step allows the identification of point mutations, associated alleles, particular alleles of a polymorphic locus, or the like. This step is followed by a second hybridization array that allows the characterization of specific mutations by using smaller, specialized probe arrays complementary to all variants, mutations, alleles detected. Each mutation array is composed of parallel probe sets, one complementary to the wild-type gene and the other complementary to the mutant gene.

[0121] In yet another embodiment, any of a variety of sequencing reactions known in the art can be used to directly sequence a gene from Tables 4-6 and detect an associated allele, a particular allele of a polymorphic locus, or the like by comparing the sequence of the sample gene from Tables 4-6 with the corresponding wild-type (control) sequence. Examples of sequencing reactions include those based on techniques developed by Maxam and Gilbert (1977) or Sanger (1977). It is also contemplated that any of a variety of automated sequencing procedures can be utilized when performing the diagnostic assays (Bio/Techniques 19:448, 1995) including sequencing by mass spectrometry (see, e.g. PCT International Publication No. WO 94/16101; Cohen et al., 1996; and Griffin et al. 1993), real-time pyrophosphate sequencing method (Ronaghi et al., 1998; and Permutt et al., 2001) and sequencing by hybridization (see e.g. Drmanac et al., 2002).

[0122] Other methods of detecting an associated allele, a particular allele of a polymorphic locus, or the likes in a gene from Tables 4-6 include methods in which protection from cleavage agents is used to detect mismatched bases in RNA/RNA, DNA/DNA or RNA/DNA heteroduplexes (Myers et al., 1985). In general, the technique of “mismatch cleavage” starts by providing heteroduplexes formed by hybridizing (labeled) RNA or DNA containing the wild-type gene sequence from Tables 4-6 with potentially mutant RNA or DNA obtained from a tissue sample. The double-stranded duplexes are treated with an agent that cleaves single-stranded regions of the duplex such as which will exist due to basepair mismatches between the control and sample strands. For instance, RNA/DNA duplexes can be treated with RNase and DNA/DNA hybrids treated with S1 nuclease to enzymatically digest the mismatched regions. In other embodiments, either DNA/DNA or RNA/DNA duplexes can be treated with hydroxylamine or osmium tetroxide and with piperidine in order to digest mismatched regions. After digestion of the mismatched regions, the resulting material is then separated by size on denaturing polyacrylamide gels to determine the site of an associated allele, a particular allele of a polymorphic locus, or the like (see, for example, Cotton et al., 1988; Saleeba et al., 1992). In a preferred embodiment, the control DNA or RNA can be labeled for detection, as described herein.

[0123] In still another embodiment, the mismatch cleavage reaction employs one or more proteins that recognize mismatched base pairs in double-stranded DNA (so called “DNA mismatch repair” enzymes) in defined systems for detecting and mapping point an associated allele, a particular allele of a polymorphic locus, or the likes in a gene from Tables 4-6 cDNAs obtained from samples of cells. For example, the mutY enzyme of E. coli cleaves A at G/A mismatches (Hsu et al., 1994). Other examples include, but are not limited to, the MutHLS enzyme complex of E. coli (Smith and Modrich., 1996) and Cel 1 from the celery (Kulinski et al., 2000) both cleave the DNA at various mismatches. According to an exemplary embodiment, a probe based on a gene sequence from Tables 4-6 is hybridized to a cDNA or other DNA product from a test cell or cells. The duplex is treated with a DNA mismatch repair enzyme, and the cleavage products, if any, can be detected using electrophoresis protocols or the like. See, for example, U.S. Pat. No. 5,459,039. Alternatively, the screen can be performed in vivo following the insertion of the heteroduplexes in an appropriate vector. The whole procedure is known to those ordinary skilled in the art and is referred to as mismatch repair detection (see e.g. Fakhrai-Rad et al., 2004).

[0124] In other embodiments, alterations in electrophoretic mobility can be used to identify an associated allele, a particular allele of a polymorphic locus, or the likes in genes from Tables 4-6. For example, single strand conformation polymorphism (SSCP) analysis can be used to detect differences in electrophoretic mobility between mutant and wild type nucleic acids (Orita et al., 1993; see also Cotton, 1993; and Hayashi et al., 1992). Single-stranded DNA fragments of sample and control nucleic acids from Tables 4-6 will be denatured and allowed to renature. The secondary structure of single-stranded nucleic acids varies according to sequence; the resulting alteration in electrophoretic mobility enables the detection of even a single base change. The DNA fragments may be labeled or detected with labeled probes. The sensitivity of the assay may be enhanced by using RNA (rather than DNA), in which the secondary structure is more sensitive to a change in sequence. In a preferred embodiment, the method utilizes heteroduplex analysis to separate double stranded heteroduplex molecules on the basis of changes in electrophoretic mobility (Kee et al., 1991).

[0125] In yet another embodiment, the movement of mutant or wild-type fragments in a polyacrylamide gel containing a gradient of denaturant is assayed using denaturing gradient gel electrophoresis (DGGE) (Myers et al., 1985). When DGGE is used as the method of analysis, DNA will be modified to insure that it does not completely denature, for example by adding a GC clamp of approximately 40 bp of high-melting GC-rich DNA by PCR. In a further embodiment, a temperature gradient is used in place of a denaturing gradient to identify differences in the mobility of control and sample DNA (Rosenbaum et al., 1987). In another embodiment, the mutant fragment is detected using denaturing HPLC (see e.g. Hoogendoorn et al., 2000).

[0126] Examples of other techniques for detecting point mutations, an associated allele, a particular allele of a polymorphic locus, or the like include, but are not limited to, selective oligonucleotide hybridization, selective amplification, selective primer extension, selective ligation, single-base extension, selective termination of extension or invasive cleavage assay. For example, oligonucleotide primers may be prepared in which the known associated allele, particular allele of a polymorphic locus, or the like is placed centrally and then hybridized to target DNA under conditions which permit hybridization only if a perfect match is found (Saiki et al., 1986; Saiki et al., 1989). Such allele specific oligonucleotides are hybridized to PCR amplified target DNA of a number of different associated alleles, a particular allele of a polymorphic locus, or the likes where the oligonucleotides are attached to the hybridizing membrane and hybridized with labeled target DNA. Alternatively, the amplification, the allele-specific hybridization and the detection can be done in a single assay following the principle of the 5′ nuclease assay (e.g. see Livak et al., 1995). For example, the associated allele, a particular allele of a polymorphic locus, or the like locus is amplified by PCR in the presence of both allele-specific oligonucleotides, each specific for one or the other allele. Each probe has a different fluorescent dye at the 5′ end and a quencher at the 3′ end. During PCR, if one or the other or both allele-specific oligonucleotides are hybridized to the template, the Taq polymerase via its 5′ exonuclease activity will release the corresponding dyes. The latter will thus reveal the genotype of the amplified product.

[0127] The hybridization may also be carried out with a temperature gradient following the principle of dynamic allele-specific hybridization or like (e.g. Jobs et al., 2003; and Bourgeois and Labuda, 2004). For example, the hybridization is done using one of the two allele-specific oligonucleotides labeled with a fluorescent dye, an intercalating quencher under a gradually increasing temperature. At low temperature, the probe is hybridized to both the mismatched and full-matched template. The probe melts at a lower temperature when hybridized to the template with a mismatch. The release of the probe is captured by an emission of the fluorescent dye, away from the quencher. The probe melts at a higher temperature when hybridized to the template with no mismatch. The temperature-dependent fluorescence signals therefore indicate the absence or presence of the associated allele, particular allele of a polymorphic locus, or the like (e.g. Jobs et al. supra). Alternatively, the hybridization is done under a gradually decreasing temperature. In this case, both allele-specific oligonucleotides are hybridized to the template competitively. At high temperature none of the two probes is hybridized. Once the optimal temperature of the full-matched probe is reached, it hybridizes and leaves no target for the mismatched probe. In the latter case, if the allele-specific probes are differently labeled, then they are hybridized to a single PCR-amplified target. If the probes are labeled with the same dye, then the probe cocktail is hybridized twice to identical templates with only one labeled probe, different in the two cocktails, in the presence of the unlabeled competitive probe.

[0128] Alternatively, allele specific amplification technology that depends on selective PCR amplification may be used in conjunction with the present invention, Oligonucleotides used as primers for specific amplification may carry the associated allele, particular allele of a polymorphic locus, or the like of interest in the center of the molecule, so that amplification depends on differential hybridization (Gibbs et al., 1989) or at the extreme 3′ end of one primer where, under appropriate conditions, mismatch can prevent, or reduce polymerase extension (Prossner, 1993). In addition it may be desirable to introduce a novel restriction site in the region of the associated allele, particular allele of a polymorphic locus, or the like to create cleavage-based detection (Gasparini et al., 1992). It is anticipated that in certain embodiments amplification may also be performed using Taq ligase for amplification (Barany, 1991). In such cases, ligation will occur only if there is a perfect match at the 3′ end of the 5′ sequence making it possible to detect the presence of a known associated allele, a particular allele of a polymorphic locus, or the like at a specific site by looking for the presence or absence of amplification. The products of such an oligonucleotide ligation assay can also be detected by means of gel electrophoresis. Furthermore, the oligonucleotides may contain universal tags used in PCR amplification and zip code tags that are different for each allele. The zip code tags are used to isolate a specific, labeled oligonucleotide that may contain a mobility modifier (e.g. Grossman et al., 1994).

[0129] In yet another alternative, allele-specific elongation followed by ligation will form a template for PCR amplification. In such cases, elongation will occur only if there is a perfect match at the 3′ end of the allele-specific oligonucleotide using a DNA polymerase. This reaction is performed directly on the genomic DNA and the extension/ligation products are amplified by PCR. To this end, the oligonucleotides contain universal tags allowing amplification at a high multiplex level and a zip code for SNP identification. The PCR tags are designed in such a way that the two alleles of a SNP are amplified by different forward primers, each having a different dye. The zip code tags are the same for both alleles of a given SNP and they are used for hybridization of the PCR-amplified products to oligonucleotides bound to a solid support, chip, bead array or like. For an example of the procedure, see Fan et al. (Cold Spring Harbor Symposia on Quantitative Biology, Vol. LXVIII, pp. 69-78, 2003).

[0130] Another alternative includes the single-base extension/ligation assay using a molecular inversion probe, consisting of a single, long oligonucleotide (see e.g. Hardenbol et al., 2003). In such an embodiment, the oligonucleotide hybridizes on both sides of the SNP locus directly on the genomic DNA, leaving a one-base gap at the SNP locus. The gap-filling, one-base extension/ligation is performed in four tubes, each having a different dNTP. Following this reaction, the oligonucleotide is circularized whereas unreactive, linear oligonucleotides are degraded using an exonuclease such as exonuclease I of E. coli. The circular oligonucleotides are then linearized and the products are amplified and labeled using universal tags on the oligonucleotides. The original oligonucleotide also contains a SNP-specific zip code allowing hybridization to oligonucleotides bound to a solid support, chip, bead array or the like. This reaction can be performed at a highly multiplexed level.

[0131] In another alternative, the associated allele, particular allele of a polymorphic locus, or the like is scored by single-base extension (see e.g. U.S. Pat. No. 5,888,819). The template is first amplified by PCR. The extension oligonucleotide is then hybridized next to the SNP locus and the extension reaction is performed using a thermostable polymerase such as ThermoSequenase (GE Healthcare) in the presence of labeled ddNTPs. This reaction can therefore be cycled several times. The identity of the labeled ddNTP incorporated will reveal the genotype at the SNP locus. The labeled products can be detected by means of gel electrophoresis, fluorescence polarization (e.g. Chen et al., 1999) or by hybridization to oligonucleotides bound to a solid support, chip, bead array or the like. In the latter case, the extension oligonucleotide will contain a SNP-specific zip code tag.

[0132] In yet another alternative, the variant is scored by selective termination of extension. The template is first amplified by PCR and the extension oligonucleotide hybridizes in vicinity to the SNP locus, close to but not necessarily adjacent to it. The extension reaction is carried out using a thermostable polymerase such as ThermoSequenase (GE Healthcare) in the presence of a mix of dNTPs and at least one ddNTP. The latter has to terminate the extension at one of the alleles of the interrogated SNP, but not both such that the two alleles will generate extension products of different sizes. The extension product can then be detected by means of gel electrophoresis, in which case the extension products need to be labeled, or by mass spectrometry (see e.g. Storm et al., 2003).

[0133] In another alternative, the associated allele, particular allele of a polymorphic locus, or the like is detected using an invasive cleavage assay (see U.S. Pat. No. 6,090,543). There are five oligonucleotides per SNP to interrogate but these are used in a two step-reaction. During the primary reaction, three of the designed oligonucleotides are first hybridized directly to the genomic DNA. One of them is locus-specific and hybridizes up to the SNP locus (the pairing of the 3′ base at the SNP locus is not necessary). There are two allele-specific oligonucleotides that hybridize in tandem to the locus-specific probe but also contain a 5′ flap that is specific for each allele of the SNP. Depending upon hybridization of the allele-specific oligonucleotides at the base of the SNP locus, this creates a structure that is recognized by a cleavase enzyme (U.S. Pat. No. 6,090,606) and the allele-specific flap is released. During the secondary reaction, the flap fragments hybridize to a specific cassette to recreate the same structure as above except that the cleavage will release a small DNA fragment labeled with a fluorescent dye that can be detected using regular fluorescence detector. In the cassette, the emission of the dye is inhibited by a quencher.

[0134] Other types of markers can also be used for diagnostic purposes. For example, microsatellites can also be useful to detect the genetic predisposition of an individual to a given disorder. Microsatellites consist of short sequence motifs of one or a few nucleotides repeated in tandem. The most common motifs are polynucleotide runs, dinucleotide repeats (particularly the CA repeats) and trinucleotide repeats. However, other types of repeats can also be used. The microsatellites are very useful for genetic mapping because they are highly polymorphic in their length. Microsatellite markers can be typed by various means, including but not limited to DNA fragment sizing, oligonucleotide ligation assay and mass spectrometry. For example, the locus of the microsatellite is amplified by PCR and the size of the PCR fragment will be directly correlated to the length of the microsatellite repeat. The size of the PCR fragment can be detected by regular means of gel electrophoresis. The fragment can be labeled internally during PCR or by using end-labeled oligonucleotides in the PCR reaction (e.g. Mansfield et al., 1996). Alternatively, the size of the PCR fragment is determined by mass spectrometry. In such a case, however, the flanking sequences need to be eliminated. This can be achieved by ribozyme cleavage of an RNA transcript of the microsatellite repeat (Krebs et al., 2001). For example, the microsatellite locus is amplified using oligonucleotides that include a T7 promoter on one end and a ribozyme motif on the other end. Transcription of the amplified fragments will yield an RNA substrate for the ribozyme, releasing small RNA fragments that contain the repeated region. The size of the latter is determined by mass spectrometry. Alternatively, the flanking sequences are specifically degraded. This is achieved by replacing the dTTP in the PCR reaction by dUTP. The dUTP nucleosides are then removed by uracyl DNA glycosylases and the resulting abasic sites are cleaved by either abasic endonucleases such as human AP endonuclease or chemical agents such as piperidine. Bases can also be modified post-PCR by chemical agents such as dimethyl sulfate and then cleaved by other chemical agents such as piperidine (see e.g. Maxam and Gilbert, 1977; U.S. Pat. No. 5,869,242; and U.S. patent pending Ser. No. 60/335,068).

[0135] In another alternative, an oligonucleotide ligation assay can be performed. The microsatellite locus is first amplified by PCR. Then, different oligonucleotides can be submitted to ligation at the center of the repeat with a set of oligonucleotides covering all the possible lengths of the marker at a given locus (Zirvi et al., 1999). Another example of design of an oligonucleotide assay comprises the ligation of three oligonucleotides; a 5′ oligonucleotide hybridizing to the 5′ flanking sequence, a repeat oligonucleotide of the length of the shortest allele of the marker hybridizing to the repeated region and a set of 3′ oligonucleotides covering all the existing alleles hybridizing to the 3′ flanking sequence and a portion of the repeated region for all the alleles longer than the shortest one. For the shortest allele, the 3′ oligonucleotide exclusively hybridizes to the 3′ flanking sequence (U.S. Pat. No. 6,479,244).

[0136] The methods described herein may be performed, for example, by utilizing pre-packaged diagnostic kits comprising at least one probe nucleic acid selected from the SEQ ID of Tables 2, 3 and 7-10, or antibody reagent described herein, which may be conveniently used, for example, in a clinical setting to diagnose patient exhibiting symptoms or a family history of a disorder or disorder involving abnormal activity of genes from Tables 4-6.

### Method to Treat an Animal Suspected of Having Crohn's Disease

[0137] The present invention provides methods of treating a disorder associated with Crohn's disease by expressing in vivo the nucleic acids of at least one gene from Tables 4-6. These nucleic acids can be inserted into any of a number of well-known vectors for the transfection of target cells and organisms as described below. The nucleic acids are transfected into cells, ex vivo or in vivo, through the interaction of the vector and the target cell. The nucleic acids encoding a gene from Tables 4-6, under the control of a promoter, then express the encoded protein, thereby mitigating the effects of absent, partial inactivation, or abnormal expression of a gene from Tables 4-6.

[0138] Such gene therapy procedures have been used to correct acquired and inherited genetic defects, cancer, and viral infection in a number of contexts. The ability to express artificial genes in humans facilitates the prevention and/or cure of many important human disorders, including many disorders which are not amenable to treatment by other therapies (for a review of gene therapy procedures, see Anderson, 1992; Nabel & Felgner, 1993; Mitani & Caskey, 1993; Mulligan, 1993; Dillon, 1993; Miller, 1992; Van Brunt, 1998; Vigne, 1995; Kremer & Perricaudet 1995; Doerfler & Bohm 1995; and Yu et al., 1994)

[0139] Delivery of the gene or genetic material into the cell is the first critical step in gene therapy treatment of a disorder. A large number of delivery methods are well known to those of skill in the art. Preferably, the nucleic acids are administered for in vivo or ex vivo gene therapy uses. Non-viral vector delivery systems include DNA plasmids, naked nucleic acid, and nucleic acid complexed with a delivery vehicle such as a liposome. Viral vector delivery systems include DNA and RNA viruses, which have either episomal or integrated genomes after delivery to the cell. For a review of gene therapy procedures, see the references included in the above section.

[0140] The use of RNA or DNA based viral systems for the delivery of nucleic acids take advantage of highly evolved processes for targeting a virus to specific cells in the body and trafficking the viral payload to the nucleus. Viral vectors can be administered directly to patients (in vivo) or they can be used to treat cells in vitro and the modified cells are administered to patients (ex vivo). Conventional viral based systems for the delivery of nucleic acids could include retroviral, lentivirus, adenoviral, adeno-associated and herpes simplex virus vectors for gene transfer. Viral vectors are currently the most efficient and versatile method of gene transfer in target cells and tissues. Integration in the host genome is possible with the retrovirus, lentivirus, and adeno-associated virus gene transfer methods, often resulting in long term expression of the inserted transgene. Additionally, high transduction efficiencies have been observed in many different cell types and target tissues.

[0141] The tropism of a retrovirus can be altered by incorporating foreign envelope proteins, expanding the potential target population of target cells. Lentiviral vectors are retroviral vectors that are able to transduce or infect non-dividing cells and typically produce high viral titers. Selection of a retroviral gene transfer system would therefore depend on the target tissue. Retroviral vectors are comprised of cis-acting long terminal repeats with packaging capacity for up to 6-10 kb of foreign sequence. The minimum cis-acting LTRs are sufficient for replication and packaging of the vectors, which are then used to integrate the therapeutic gene into the target cell to provide permanent transgene expression. Widely used retroviral vectors include those based upon murine leukemia virus (MuLV), gibbon ape leukemia virus (GaLV), Simian Immuno deficiency virus (SIV), human immuno deficiency virus (HIV), and combinations thereof (see, e.g., Buchscher et al., 1992; Johann et al., 1992; Sommerfelt et al., 1990; Wilson et al., 1989; Miller et al., 1999; and PCT/US94/05700).

[0142] In applications where transient expression of the nucleic acid is preferred, adenoviral based systems are typically used. Adenoviral based vectors are capable of very high transduction efficiency in many cell types and do not require cell division. With such vectors, high titer and levels of expression have been obtained. This vector can be produced in large quantities in a relatively simple system. Adeno-associated virus (“AAV”) vectors are also used to transduce cells with target nucleic acids, e.g., in the in vitro production of nucleic acids and peptides, and for in vivo and ex viva gene therapy procedures (see, e.g., West et al., 1987; U.S. Pat. No. 4,797,368; WO 93/24641; Kotin, 1994; Muzyczka, 1994). Construction of recombinant AAV vectors is described in a number of publications, including U.S. Pat. No. 5,173,414; Tratschin et al., 1985; Tratschin, et al., 1984; Hermonat & Muzyczka, 1984; and Samulski et al., 1989.

[0143] In particular, numerous viral vector approaches are currently available for gene transfer in clinical trials, with retroviral vectors by far the most frequently used system. All of these viral vectors utilize approaches that involve complementation of defective vectors by genes inserted into helper cell lines to generate the transducing agent. pLASN and MFG-S are examples are retroviral vectors that have been used in clinical trials (Dunbar et al., 1995; Kohn et al., 1995; Malech et al., 1997). PA317/pLASN was the first therapeutic vector used in a gene therapy trial (Blaese et al., 1995). Transduction efficiencies of 50% or greater have been observed for MFG-S packaged vectors (Ellem et al., 1997; and Dranoff et al., 1997).

[0144] Recombinant adeno-associated virus vectors (rAAV) are a promising alternative gene delivery systems based on the defective and nonpathogenic parvovirus adeno-associated type 2 virus, All vectors are derived from a plasmid that retains only the AAV 145 by inverted terminal repeats flanking the transgene expression cassette. Efficient gene transfer and stable transgene delivery due to integration into the genomes of the transduced cell are key features for this vector system (Wagner et al., 1998, Kearns et all 996).

[0145] Replication-deficient recombinant adenoviral vectors (Ad) are predominantly used in transient expression gene therapy; because they can be produced at high titer and they readily infect a number of different cell types. Most adenovirus vectors are engineered such that a transgene replaces the Ad E1a, E1b, and E3 genes; subsequently the replication defector vector is propagated in human 293 cells that supply the deleted gene function in trans. Ad vectors can transduce multiple types of tissues in vivo, including nondividing, differentiated cells such as those found in the liver, kidney and muscle tissues. Conventional Ad vectors have a large carrying capacity. An example of the use of an Ad vector in a clinical trial involved polynucleotide therapy for antitumor immunization with intramuscular injection (Sterman et al., 1998). Additional examples of the use of adenovirus vectors for gene transfer in clinical trials include Rosenecker et al., 1996; Sterman et al., 1998; Welsh et al., 1995; Alvarez et al., 1997; Topf et al., 1998.

[0146] Packaging cells are used to form virus particles that are capable of infecting a host cell. Such cells include 293 cells, which package adenovirus, and ψ2 cells or PA317 cells, which package retrovirus. Viral vectors used in gene therapy are usually generated by a producer cell line that packages a nucleic acid vector into a viral particle. The vectors typically contain the minimal viral sequences required for packaging and subsequent integration into a host, other viral sequences being replaced by an expression cassette for the protein to be expressed. The missing viral functions are supplied in trans by the packaging cell line. For example, AAV vectors used in gene therapy typically only possess ITR sequences from the AAV genome which are required for packaging and integration into the host genome. Viral DNA is packaged in a cell line, which contains a helper plasmid encoding the other AAV genes, namely rep and cap, but lacking ITR sequences. The cell line is also infected with adenovirus as a helper. The helper virus promotes replication of the AAV vector and expression of AAV genes from the helper plasmid. The helper plasmid is not packaged in significant amounts due to a lack of ITR sequences. Contamination with adenovirus can be reduced by, e.g., heat treatment to which adenovirus is more sensitive than AAV.

[0147] In many gene therapy applications, it is desirable that the gene therapy vector be delivered with a high degree of specificity to a particular tissue type. A viral vector is typically modified to have specificity for a given cell type by expressing a ligand as a fusion protein with a viral coat protein on the viruses outer surface. The ligand is chosen to have affinity for a receptor known to be present on the cell type of interest. For example, Han et al., 1995, reported that Moloney murine leukemia virus can be modified to express human heregulin fused to gp70, and the recombinant virus infects certain human breast cancer cells expressing human epidermal growth factor receptor. This principle can be extended to other pairs of viruses expressing a ligand fusion protein and target cells expressing a receptor. For example, filamentous phage can be engineered to display antibody fragments (e.g., Fab or Fv) having specific binding affinity for virtually any chosen cellular receptor. Although the above description applies primarily to viral vectors, the same principles can be applied to nonviral vectors. Such vectors can be engineered to contain specific uptake sequences thought to favor uptake by specific target cells.

[0148] Gene therapy vectors can be delivered in vivo by administration to an individual patient, typically by systemic administration (e.g., intravenous, intraperitoneal, intramuscular, subdermal, or intracranial infusion) or topical application. Alternatively, vectors can be delivered to cells ex vivo, such as cells explanted from an individual patient (e.g., lymphocytes, bone marrow aspirates, and tissue biopsy) or universal donor hematopoietic stem cells, followed by reimplantation of the cells into a patient, usually after selection for cells which have incorporated the vector.

[0149] Ex vivo cell transfection for diagnostics, research, or for gene therapy (e.g., via re-infusion of the transfected cells into the host organism) is well known to those of skill in the art. In a preferred embodiment, cells are isolated from the subject organism, transfected with a nucleic acid (gene or cDNA), and re-infused back into the subject organism (e.g., patient). Various cell types suitable for ex vivo transfection are well known to those of skill in the art (see, e.g., Freshney et al., 1994; and the references cited therein for a discussion of how to isolate and culture cells from patients).

[0150] In one embodiment, stem cells are used in ex vivo procedures for cell transfection and gene therapy. The advantage to using stem cells is that they can be differentiated into other cell types in vitro, or can be introduced into a mammal (such as the donor of the cells) where they will engraft in the bone marrow. Methods for differentiating Crohn disease34+ cells in vitro into clinically important immune cell types using cytokines such a GM-CSF, IFN-γ and TNF-α are known (see Inaba et al., 1992).

[0151] Stem cells are isolated for transduction and differentiation using known methods. For example, stem cells are isolated from bone marrow cells by panning the bone marrow cells with antibodies which bind unwanted cells, such as Crohn disease4+ and Crohn disease8+ (T cells), Crohn disease45+ (panB cells), GR-1 (granulocytes), and lad (differentiated antigen presenting cells).

[0152] Vectors (e.g., retroviruses, adenoviruses, liposomes, etc.) containing therapeutic nucleic acids can be also administered directly to the organism for transduction of cells in vivo. Alternatively, naked DNA can be administered.

[0153] Administration is by any of the routes normally used for introducing a molecule into ultimate contact with blood or tissue cells, as described above. The nucleic acids from Tables 4-6 are administered in any suitable manner, preferably with the pharmaceutically acceptable carriers described above. Suitable methods of administering such nucleic acids are available and well known to those of skill in the art, and, although more than one route can be used to administer a particular composition, a particular route can often provide a more immediate and more effective reaction than another route (see Samulski et al., 1989). The present invention is not limited to any method of administering such nucleic acids, but preferentially uses the methods described herein.

[0154] The present invention further provides other methods of treating Crohn's disease such as administering to an individual having Crohn's disease an effective amount of an agent that regulates the expression, activity or physical state of at least one gene from Tables 4-6. An “effective amount” of an agent is an amount that modulates a level of expression or activity of a gene from Tables 4-6, in a cell in the individual at least about 10%, at least about 20%, at least about 30%, at least about 40%, at least about 50%, at least about 60%, at least about 70%, at least about 80% or more, compared to a level of the respective gene from Tables 4-6 in a cell in the individual in the absence of the compound. The preventive or therapeutic agents of the present invention may be administered, either orally or parenterally, systemically or locally. For example, intravenous injection such as drip infusion, intramuscular injection, intraperitoneal injection, subcutaneous injection, suppositories, intestinal lavage, oral enteric coated tablets, and the like can be selected, and the method of administration may be chosen, as appropriate, depending on the age and the conditions of the patient. The effective dosage is chosen from the range of 0.01 mg to 100 mg per kg of body weight per administration. Alternatively, the dosage in the range of 1 to 1000 mg, preferably 5 to 50 mg per patient may be chosen. The therapeutic efficacy of the treatment may be monitored by observing various parts of the GI tract, by endoscopy, barium, colonoscopy, or any other monitoring methods known in the art. Other ways of monitoring efficacy can be, but are not limited to monitoring inflammatory conditions involving the upper gastrointestinal tract such as monitoring the amelioration on the esophageal discomfort, decrease in pain, improved swallowing, reduced chest pain, decreased heartburn, decreased regurgitation of solids or liquids after swallowing or eating, decrease in vomiting, or improvement in weight gain or improvement in vitality.

[0155] The present invention further provides a method of treating an individual clinically diagnosed with Crohns' disease. The methods generally comprises analyzing a biological sample that includes a cell, in some cases, a GI track cell, from an individual clinically diagnosed with Crohn's disease for the presence of modified levels of expression of at least 1 gene, at least 10 genes, or at least 50 genes from Tables 4-6. A treatment plan that is most effective for individuals clinically diagnosed as having a condition associated with Crohn's disease is then selected on the basis of the detected expression of such genes in a cell. Treatment may include administering a composition that includes an agent that modulates the expression or activity of a protein from Tables 4-6 in the cell. Information obtained as described in the methods above can also be used to predict the response of the individual to a particular agent. Thus, the invention further provides a method for predicting a patient's likelihood to respond to a drug treatment for a condition associated with Crohn's disease, comprising determining whether modified levels of a gene from Tables 4-6 is present in a cell, wherein the presence of protein is predictive of the patient's likelihood to respond to a drug treatment for the condition. Examples of the prevention or improvement of symptoms accompanied by Crohn's disease that can monitored for effectiveness include prevention or improvement of diarrhea, prevention or improvement of weight loss, inhibition of bowel tissue edema, inhibition of cell infiltration, inhibition of surviving period shortening, and the like, and as a result, a preventing or improving agent for diarrhea, a preventing or improving agent for weight loss, an inhibitor for bowel tissues edema, an inhibitor for cell infiltration, an inhibitor for surviving period shortening, and the like can be identified.

[0156] The invention also provides a method of predicting a response to therapy in a subject having Crohn's disease by determining the presence or absence in the subject of one or more markers associated with Crohn's disease described in Tables 2, 3 and 7-10, diagnosing the subject in which the one or more markers are present as having Crohn's disease, and predicting a response to a therapy based on the diagnosis e.g., response to therapy may include an efficacious response and/or one or more adverse events. The invention also provides a method of optimizing therapy in a subject having Crohn's disease by determining the presence or absence in the subject of one or more markers associated with a clinical subtype of Crohn's disease, diagnosing the subject in which the one or more markers are present as having a particular clinical subtype of Crohn's disease, and treating the subject having a particular clinical subtype of Crohn's disease based on the diagnosis. As an example, treatment for the fibrostenotic subtype of Crohn's disease currently includes surgical removal of the affected, structured part of the bowel.

[0157] Thus, while there are a number of treatments for Crohn's disease currently available, they all are accompanied by various side effects, high costs, and long complicated treatment protocols, which are often not available and effective in a large number of individuals. Accordingly, there remains a need in the art for more effective and otherwise improved methods for treating and preventing Crohn's disease. Thus, there is a continuing need in the medical arts for genetic markers of Crohn's disease and guidance for the use of such markers. The present invention fulfills this need and provides further related advantages.

### EXAMPLES

### Example 1

### GWS Using Samples from the QFP

[0158] Recruited Samples from the Quebec Founder Population

[0159] All individuals were sampled from the Quebec founder population (QFP). Membership in the founder population was defined as having four grandparents with French Canadian family names who were born in the Province of Quebec, Canada or in adjacent areas of the Provinces of New Brunswick and Ontario or in New England or New York State. The Quebec founder population has two distinct advantages over general populations for LD mapping. Because it is relatively young (about 12 to 15 generations from the mid 17th century to the present) and because it has a limited but sufficient number of founders (approximately 2600 effective founders, Charbonneau et al., 1987), the Quebec population is characterized both by extended LD and by decreased genetic heterogeneity. The increased extent of LD allows the detection of disease associated genes using a reasonable marker density, while still allowing the increased meiotic resolution of population-based mapping. The number of founders is small enough to result in increased LD and reduced allelic heterogeneity, yet large enough to insure that all of the major disease genes involved in general populations are present in Quebec. Reduced allelic heterogeneity will act to increase relative risk imparted by the remaining alleles and so increase the power of case/control studies to detect genes and gene alleles involved in complex disorders within the Quebec population. The specific combination of age in generations, optimal number of founders and large present population size makes the QFP optimal for LD-based gene mapping.

[0160] Patient inclusion criteria for the study include diagnosis for Crohn's disease by any one of the following: a colonoscopy, a radiological examination with barium, an abdominal surgical operation or a biopsy or a surgical specimen. The colonoscopy diagnosis consists of observing linear, deep or serpentigenous ulcers, pseudopolyps, or skip areas. The barium radiological examination consists of the detection of strictures, ulcerations and string signs by observing the barium enema and the small bowel followed through an NMRI series.

[0161] Patients that were diagnosed with ulcerative colitis, infectious colitis or other intestinal diseases were excluded from the study. All human sampling was subject to ethical review procedures.

[0162] All enrolled QFP subjects (patients and controls) provided a 30 ml blood sample (3 barcoded tubes of 10 ml). Samples were processed immediately upon arrival at Genizon's laboratory. All samples were scanned and logged into a LabVantage Laboratory Information Management System (LIMS), which served as a hub between the clinical data management system and the genetic analysis system. Following centrifugation, the buffy coat containing the white blood cells was isolated from each tube. Genomic DNA was extracted from the buffy coat from one of the tubes, and stored at 4° C. until required for genotyping. DNA extraction was performed with a commercial kit using a guanidine hydrochloride based method (FlexiGene, Qiagen) according to the manufacturer's instructions. The extraction method yielded high molecular weight DNA, and the quality of every DNA sample was verified by agarose gel electrophoresis. Genomic DNA appeared on the gel as a large band of very high molecular weight. The remaining two buffy coats were stored at −80° C. as backups.

[0163] The QFP samples were collected as family trios consisting of Crohn's disease subjects and two first degree relatives. Of the 500 trios, 477 were Parent, Parent, Child (PPC) trios; the remainders were Parent, Child, Child (PCC) trios. Only the PPC trios were used for the analysis reported here because they produced equal numbers of more accurately estimated case and control haplotypes than the PCC trios. 382 trios were used in the genome wide scan component of the study. One member of each trio was affected with Crohn's disease. For the 382 trios used in the genome wide scan, these included 189 daughters, 90 sons, 54 mothers and 49 fathers. When a child was the affected member of the trio, the two non-transmitted parental chromosomes (one from each parent) were used as controls, when one of the parents was affected, that person's spouse provided the control chromosomes. The recruitment of trios allowed a more precise determination of long extended haplotypes.

### Genome Wide Scan Genotyping

[0164] Genotyping was performed using Perlegen's ultra-high-throughput platform. Marker loci were amplified by PCR and hybridized to wafers containing arrays of oligonucleotides. Allele discrimination was performed through allele-specific hybridization. In total, 248,535 SNPs, distributed as evenly as possible throughout the genome, were genotyped on the 382 QFP trios for a total of 372,802,500 genotypes. These markers were mostly selected from various databases including the ˜1.6 million SNP database of Perlegen Life Sciences (Patil, 2001); several thousand were obtained from the HapMap consortium database and/or dbSNP at NCBI. The SNPs were chosen to maximize uniformity of genetic coverage and to cover a distribution of allele frequencies. All SNPs that did not pass the quality controls for the assay, that is, that had a minor allele frequency of less than 1%, a Mendelian error rate within trios greater than 1%, that deviated significantly from the Hardy-Weinberg equilibrium, or that had excessive missing data (cut-off at 5% missing values or higher) were removed from the analysis. Genetic analysis was performed on a total of 165,785 SNPs (158,775 autosomal, 6869 X chromosome and 141 Y chromosome). The average gap size was approximately 17 kb. Of the 165,785 markers, ˜140,000 had a minor allele frequency (MAF) greater than 10% for the QFP. The genotyping information was entered into a Unified Genotype Database (a proprietary database under development) from which it was accessed using custom-built programs for export to the genetic analysis pipeline. Analyses of these genotypes were performed with the statistical tools described in the section below. The GWS permitted the identification of the candidate chromosomal region linked to Crohn's disease (Table 1).

### Genetic Analysis

[0165] 1. Dataset Quality Assessment

[0166] Prior to performing any analysis, the dataset from the GWS was verified for completeness of the trios. The program GGFileMod removed any trios with abnormal family structure or missing individuals (e.g. trios without a proband, duos, singletons, etc.), and calculated the total number of complete trios in the dataset. The trios were also tested to make sure that no subjects within the cohort were related more closely than second cousins (6 meiotic steps).

[0167] Subsequently, the program DataCheck2.1 was used to calculate the following statistics per marker and per family:
[0168] Minor allele frequency (MAF) for each marker; Missing values for each marker and family; Hardy Weinberg Equilibrium for each marker; and
[0169] Mendelian segregation error rate.

[0170] The following acceptance criteria were applied for internal analysis purposes:
[0171] MAF>1%;
[0172] Missing values <1%;
[0173] Observed non-Mendelian segregation <0.33%;
[0174] Non significant deviation in allele frequencies from Hardy Weinberg equilibrium.

[0175] Markers or families not meeting these criteria were removed from the dataset in the following step. Analyses of variance were performed using the algorithm GenAnova, to assess whether families or markers have a greater effect on missing values and/or non-Mendelian segregation. This was used to determine the smallest number of data points to remove from the dataset in order to meet the requirements for missing values and non-Mendelian segregation. The families and/or markers were removed from the dataset using the program DataPull, which generates an output file that is used for subsequent analysis of the genotype data.

[0176] 2. Phase Determination

[0177] The program PhaseFinderSNP2.0 was used to determine phase from trio data on a marker-by-marker, trio-by-trio basis. The output file contains haplotype data for all trio members, with ambiguities present when all trio members are heterozygous or where data is missing. The program FileWriterTemp was then used to determine case and control haplotypes and to prepare the data in the proper input format for the next stage of analysis, using the expectation maximization algorithm, PL-EM, to call phase on the remaining ambiguities. This stage consists of several modules for resolution of the remaining phase ambiguities. PLEMInOut1 was first used to recode the haplotypes for input into the PL-EM algorithm in 15-marker blocks for the genome wide scan data and for 11 marker blocks for fine and ultra-fine mapping data sets. The haplotype information was encoded as genotypes, allowing for the entry of known phase into the algorithm; this method limits the possible number of estimated haplotypes conditioned on already known phase assignments. The PL-EM algorithm was used to estimate haplotypes from the “pseudo-genotype” data in 11 or 15-marker windows, advancing in increments of one marker across the chromosome. The results were then converted into multiple haplotype files using the program PLEMInOut2. Subsequently PLEMBlockGroup was used to convert the individual 11 or 15-marker block files into one continuous block of haplotypes for the entire chromosome, and to generate files for further analysis by LDSTATS and SINGLETYPE. PLEMBlockGroup takes the consensus estimation of the allele call at each marker over all separate estimations (most markers are estimated 11-15 different times as the 11 or 15 marker blocks pass over their position).

[0178] 3. Haplotype Association Analysis

[0179] Haplotype association analysis was performed using the program LDSTATS. LDSTATS tests for association of haplotypes with the disease phenotype. The algorithms LDSTATS (v2.0) and LDSTATS (v4.0) define haplotypes using multi-marker windows that advance across the marker map in one-marker increments. Windows can contain any odd number of markers specified as a parameter of the algorithm. Other marker windows can also be used. At each position the frequency of haplotypes in cases and controls was calculated and a chi-square statistic was calculated from case control frequency tables. For LDSTATS v2.0, the significance of the chi-square for single marker and 3-marker windows was calculated as Pearson's chi-square with degrees of freedom. Larger windows of multi-allelic haplotype association were tested using Smith's normalization of the square root of Pearson's Chi-square. In addition, LDSTATS v2.0 calculates Chi-square values for the transmission disequilibrium test (TDT) for single markers in situations where the trios consisted of parents and an affected child.

[0180] LDSTATS v4.0 calculates significance of chi-square values using a permutation test in which case-control status is randomly permuted until 350 permuted chi-square values are observed that are greater than or equal to chi-square value of the actual data. The P value is then calculated as 350/the number of permutations required.

[0181] Table 2 lists the results for association analysis using LDSTATs (v2.0 and v4.0) for the region described above based on the genome wide scan genotype data for 382 QFP trios. For each region that was associated with Crohn disease in the genome wide scan, we report in Table 3 the allele frequencies and the relative risk (RR) for the haplotypes contributing to the best signal at each SNP in the region. The best signal at a given location was determined by comparing the significance (p-value) of the association with Crohn disease for window sizes of 1, 3, 5, 7, and 9 SNPs, and selecting the most significant window. For a given window size at a given location, the association with Crohn disease was evaluated by comparing the overall distribution of haplotypes in the cases with the overall distribution of haplotypes in the controls. Haplotypes with a relative risk greater than one increase the risk of developing Crohn disease while haplotypes with a relative risk less than one are protective and decrease the risk.

[0182] 4. Singletype Analysis

[0183] The SINGLETYPE algorithm assesses the significance of case-control association for single markers using the genotype data from the laboratory as input in contrast to LDSTATS single marker window analyses, in which case-control alleles for single markers from estimated haplotypes in file, hapatctr.txt, as input. SINGLETYPE calculates P values for association for both alleles, 1 and 2, as well as for genotypes, 11, 12, and 22, and plots these as −log₁₀ P values for significance of association against marker position.

Gene Identification and Characterization from GWS on the QFP Samples

[0184] A series of gene characterization was performed for candidate region 1 described in Table 1. Any gene or EST mapping to the interval based on public map data or proprietary map data was considered as a candidate Crohn's disease gene (see Tables 4-6 for the list of genes).

### Example 2

### The Replication and Functional Characterization of ATG16L1 Gene in European Samples

### DETAILED DESCRIPTION OF THE DRAWINGS

[0185] FIG. 1 Crohn disease (CD) patient and control samples used for association analysis. The patient samples are organized in ‘panels’ that correspond to successive steps of the study. Index cases from trios were also used in the case-control analyses so that, for example, a total of 878 cases (498+380) were available for the case-control comparison in panel B.

[0186] FIG. 2 Overview of the physical and genetic structure of the ATG16L1 gene region. The physical position of the SNPs investigated and a schematic chart of the gene structure are shown in the top panel. The only coding SNP is marked in red. The coordinates refer to the genome assembly build 35. The lower panel gives an overview of the linkage disequilibrium structure of the locus (D') as generated by Haploview from the Caucasian HapMap data. The SNPs used in the haplotype analysis (see also Table 10) are marked with asterisks.

[0187] FIG. 3 Presence of ATG16L1 in tissues of interest. Panel A shows the expression of ATG16L1 in a set of different tissues as detected by RT-PCR (IEC, Intestinal Epithelial Cells). The corresponding □-Actin control (518 by amplicon size) is given below. Panel B shows a Western blot analysis of ATG16L1 in colonic mucosa. Proteins (15 μg) from rectal mucosal biopsies of Crohn disease patients (CD) and normal controls (N) were separated by denaturing SDS-PAGE, transferred onto PVDF membranes and probed for presence of ATG16L1 using a specific primary antibody and horseradish-peroxidase-coupled secondary antibody. ATG16L1 is present in the mucosa of CD patients and healthy controls at the same level. Panels C-E demonstrate the expression and localization of the ATG16L1 protein in colonic tissue from a CD patient (C) and a normal control (D). Intestinal epithelial cells are marked with arrows, mononuclear cells are highlighted with arrowheads. Panel E shows a control staining without the primary antibody in a CD sample.

[0188] FIG. 4 Domain architecture of human ATG16L1 and yeast ATG16. The position of the variant amino acid T300A in the WD repeat domain, consequent to SNP rs2241880, is marked. The annotated APG16 Pfam domain consists of coiled coils. The C-terminal residue K150 of yeast ATG16 corresponds to S213 of human ATG16L1 according to a pair-wise sequence alignment.

[0189] FIG. 53D structure model of the WD-repeat domain of human ATG16L1. The 32 β-strands forming an 8-bladed β-propeller are numbered as in Supplementary FIG. 1. The location of the variant amino acid T300A in strand β3, corresponding to rs2241880, is marked in yellow.

[0190] FIG. 6: SNP selection and assay development process

[0191] FIG. 7: Distribution of nεSNP panel across human chromosomes

[0192] FIG. 8 (a-d): Structure-based multiple sequence alignment of the WD-repeat domains of ATG16L1 homologs and the related proteins CDC4, SIF2, TUP1, and TLE1 with known 3D structures. Each alignment row contains a single WD repeat frequently characterized by GH and WD dipeptides (bottom annotation). CDC4 and SIF2 comprise eight WD repeats, whereas TUP1 and TLE1 contain seven WD repeats. The secondary structure depicted at the top of each alignment rows is taken from CDC4 and represents the □-strands characteristic of WD repeats, Physicochemically conserved amino acids are highlighted in blue boxes. Residue numbering in the alignment is based on complete protein sequences. The position of the sequence variant T300A of human ATG16L1 is marked (top annotation).

[0193] FIG. 9: Exemplary output of a secondary structure prediction for human ATG16L1 (protein accession number Q676U5). Here, the PSIPRED web server produced the depicted prediction.

### PATIENT RECRUITMENT

[0194] The German patients in panels A and B were recruited at the Charité University Hospital (Berlin, Germany) and the Department of General Internal Medicine of the Christian-Albrechts-University (Kiel, Germany), with the support of the German Crohn and Colitis Foundation (see FIG. 1). Clinical, radiological and endoscopic (i.e. type and distribution of lesions) examinations were required to unequivocally confirm the diagnosis of Crohn disease, and histological findings also had to be confirmative of, or compatible with, the diagnosis. In case of uncertainty, patients were excluded from the study. The patient sample has been used in several studies before and the respective publications provide a more detailed account of the phenotyping techniques employed. German control individuals were obtained from the POPGEN biobank. The UK patients were recruited by the collaborating centre as described before; UK controls were obtained from the 1958 British Birth Cohort (http://www.b58cgene.sgul.ac.uk). All recruitment protocols were approved by ethics committees at the participating centres prior to commencement of the study and participants were obliged to give written, informed consent.

### Construction of the Coding SNP Set

[0195] Full details regarding the construction of the panel of 19,779 non-synonymous (or ‘coding’) SNPs (cSNPs) of the invention are described below. In brief, SNPs from dbSNP (build 117) were combined with polymorphisms discovered by the Applera exon resequencing project or during the shotgun sequencing of the human genome by Celera Genomics. Variants that could be unequivocally mapped to the human genome assembly (Celera R27) were then further selected based on their observed or expected (i.e. “double-hit” SNPs) heterozygosity in populations of European and African descent. Putatively functional SNPs were then defined as those non-synonymous variants that altered the amino-acid sequence of an annotated NCBl RefSeq, Celera or ENSEMBL transcript. For the resulting 28,709 cSNPs, DNA sequence context and allele information was submitted to the assay design pipeline of the SNPlex™ Genotyping System (v. 1.0 pre-release). The sequence context was masked for adjacent double-hit SNPs to avoid probes overlapping with other common SNPs. Finally a total of 19,779 SNPlex assay designs were obtained that were manufactured and partitioned in 428 multiplex pools of up to 48 SNPs each (mean; 45 SNPs per assay pool).

[0196] 1. SNP Database for Marker Selection

[0197] SNP data were obtained from three sources: (1) the Celera Human RefSNP database, version 3.4, which included about 2.4 million SNPs discovered during the shotgun sequencing of the Human genome by Celera Genomics, as well as 2.2 million imported from public sources, mainly dbSNP, JSNP, and HGMD; (2) The Applera Corp. SNP Project (ASP) database, which consists of 266,135 SNPs discovered in 20 European Americans and 19 African Americans by Sanger sequencing of PCR amplicons overlapping the exons of 23,363 genes annotated by Celera Genomics; and (3) SNPs included in NCBI's dbSNP database, release 117. All SNPs were mapped to the Celera Human genome assembly Release 27 and only those that mapped to unique locations, after removing redundancy, were advanced in the process (see Table A below).

TABLE A
SNP database for marker selection

| Source | Number of SNPs |
|---|---|
| Celera RefSNP database | 4,039,783 |
| Applera SNP Project database | 266,135 |
| NCBI dbSNP release 117 | 4,006,579 |
| Total non-redundant, uniquely | 5,560,475 |
| mapped | |

[0198] 2. SNP Selection and Assay Development

[0199] The SNP selection process was aimed at developing a comprehensive list of common putative functional cSNPs from all possible sources, and to avoid putative SNPs that are rare variants or potential sequencing or analysis artifacts. We thus triaged SNPs based on their measured or expected heterozygosity in populations of European and African descent. For this we used the allele frequency data obtained during the ASP project and from the genotyping of 177,781 SNPs in about 45 samples each of European American, African American, with TaqMan® Validated SNP Genotyping Assays. When no allele frequency information in population panels was available, we looked for evidence of independent discovery (so called “double-hit” SNPs). We used as evidence the ASP project calls, the donor information of the Celera shotgun reads, and the dbSNP submission handles. SNPs whose minor alleles were observed in at least two distinct donors in either the ASP or Celera shotgun SNP discovery were selected. We identified SNPs discovered independently by Celera or ASP and by the public SNP discovery efforts. We also compared single-donor Celera SNPs to the NCBI human genomic assembly to find cases where the Celera minor allele was confirmed in the public consensus sequence. Finally, for SNPs when the single source was dbSNP, SNPs with at least 3 distinct submission handles were included. We compiled 1,601,782 SNPs that meet these requirements. We then identified non-synonymous cSNPs (nsSNPs), either missense or nonsense, by mapping these SNPs to Celera, RefSeq/LocusLink, and ENSEMBL transcripts. At the end of the process we obtained 28,709 nsSNPs in at least one transcript to be submitted for assay design (see FIG. 6).

[0200] To avoid designing oligoprobes overlapping other common SNPs, we “masked” the context sequence of target SNPs for other adjacent SNPs using only the list of triaged SNPs described above. Masked context sequence and allele information was submitted to the assay design pipeline of the SNPlex™ Genotyping System, version 1.0, in batches no larger than 2500 SNPs. Design batches were organized to group SNPs belonging to a candidate gene list related to immunity and inflammation, and by similar molecular function as predicted by the PANTHER protein classification, when possible. After removing SNP assays that failed to meet the oligoprobe design or genome specificity rules, we obtained and manufactured 19,779 SNPlex SNP genotyping assays distributed in 440 multiplexes with probes to type up to 48 SNPs each. Please refer to Table A for details on the distribution and annotations of all SNPs included in the SNPlex multiplex pools.

[0201] 3. Distribution and Features of nsSNPs Panel

[0202] The figure below (FIG. 7) shows the distribution of the set of nsSNPs in our final panel across the human chromosomes. The bars show the actual number of nsSNP per chromosome, and the lines represent the nsSNP/gene ratio, based on the Celera gene annotation (R27). The raw SNP to gene ratio (blue line) shows an apparent higher than average (0.75 nsSNP/gene) value for chromosomes 5, 10, and 14, whereas chromosomes 7, 18, 20, 21, and X show a lower SNP to gene ratio. However, this apparent distortion disappears if we normalize to count only genes with at least one nsSNPs in our set (green line), where the genome average is 1.78 nsSNP/gene. The total number of Celera genes covered by nsSNP in our panel is 9,672 (out of 25,030 genes in the Celera R27 annotation).

[0203] The distribution of genes was then analyzed with nsSNPs using the PANTHER protein function classification¹⁶. Of interest was to ascertain if particular functional classes are unrepresented (i.e. genes classes where common nonsynonymous SNPs are rare) or overrepresented (i.e. gene classes with frequent common variation). A binomial distribution test was used to calculate p-value for the observed vs. expected category representation as compared to the entire gene complement, as per the Celera human gene annotation, Release 27. The analysis shown in Table B shows that certain molecular function categories are over- or underrepresented in our panel with statistical significance (note that a large proportion of genes are not currently classified).

TABLE B
Gene representation of nsSNP panel

| | hCGR27 | nsSNP | Expected | Over (+) | |
|---|---|---|---|---|---|
| Category | (n = 25030) | (n = 9603) | on nsSNP | Under (−) | p-value |
| Protein biosynthesis | 837 | 180 | 321.12 | | 2.10E−18 |
| Pre-mRNA processing | 226 | 51 | 86.71 | | 2.16E−05 |
| Chromatin packaging and remodeling | 185 | 43 | 70.98 | | 2.28E−04 |
| Protein folding | 164 | 38 | 62.92 | | 4.73E−04 |
| Cell adhesion | 533 | 313 | 204.49 | | 6.18E−18 |
| Olfaction | 296 | 192 | 113.56 | | 9.44E−12 |
| Chemosensory perception | 328 | 202 | 125.84 | | 1.94E−10 |
| Signal transduction | 3387 | 1507 | 1299.46 | | 7.20E−10 |
| Cell surface receptor mediated signal transduction | 1601 | 748 | 614.24 | | 3.49E−08 |
| Cell adhesion-mediated signaling | 292 | 173 | 112.03 | | 4.65E−08 |
| Sensory perception | 588 | 307 | 225.59 | | 1.09E−07 |
| Cell structure and motility | 1064 | 502 | 408.21 | | 2.45E−06 |
| Proteolysis | 734 | 360 | 281.61 | | 2.93E−06 |
| Cell structure | 679 | 334 | 260.5 | | 5.22E−06 |
| G-protein mediated signaling | 897 | 425 | 344.14 | | 9.83E−06 |
| Cell communication | 1250 | 567 | 479.57 | | 3.58E−05 |
| Extracellular matrix protein-mediated signaling | 54 | 40 | 20.72 | | 1.08E−04 |
| Lipid, fatty acid and steroid metabolism | 678 | 317 | 260.12 | | 2.92E−04 |

[0204] Underrepresented in this panel are classes of genes known to be highly conserved and that carry out several fundamental cellular processes (e.g. protein synthesis, chromatin packaging genes), whereas overrepresented gene classes include some classes that are know for presenting higher levels of genetic variation (e.g. olfactory receptors, cell surface/adhesion). This suggest that selection pressure might limit common potentially deleterious polymorphisms in highly conserved genes participating in fundamental cellular processes, whereas at the other extreme selection may favour common functional variation on certain classes of genes that deal with environmental interactions and other functions.

### Genotyping and Sequencing

[0205] Genomic DNA was prepared at participating centres using a variety of methods, DNA samples were thus evaluated by gel electrophoresis for the presence of high-molecular weight DNA and adjusted to 20-30 ng/μl DNA content using the Picogreen fluorescent dye (Molecular Probes—Invitrogen, Carlsbad, Calif., USA). One microliter of genomic DNA was amplified by the GenomiPhi (Amersham, Uppsala, Sweden) whole genome amplification system and fragmented at 99° C. for five minutes. One hundred nanograms of DNA were dried overnight in TwinTec hardshell 384well plates (Eppendorf, Hamburg, Germany) at room temperature. Genotyping was performed with these plates using the SNPlex™ Genotyping System (Applied Biosystems, Foster City, Calif., USA) on an automated platform, employing TECAN Freedom EVO and 96-well and 384-well TEMO liquid handling robots (TECAN, Mannedorf, Switzerland). Genotypes for the cSNP screening experiment in patient panel A were generated by automatic calling using the Genemapper 4.0 software (Applied Biosystems) with the following settings: sigma separation ≧6, angle separation for 2 cluster SNPs≦1.2 radians, median cluster intensity ≧2.2 logs. For all significant markers in panel A and all replication studies, genotypes were additionally reviewed manually and call rates >90% required. All process data were logged into, and administered by, a database-driven LIMS. Unless noted otherwise, all genotypes were generated through SNPlex.

[0206] TaqMan® SNP Genotyping Assays (Applied Biosystems, Foster City, Calif., USA) were used to genotype the CARD15 variants as described and to genotype rs2241880 in the German and UK samples by way of a technology-independent replication on an automated platform. Sequencing of genomic DNA was performed using Applied Biosystems BigDye™ chemistry according to the supplier's recommendations. Traces were inspected for the presence of SNPs and InDels using InSNP and novoSNP.

[0207] 1. Coding SNP Scan and Replication

[0208] A total of 19,779 coding SNPs were genotyped in the samples of panel A (735 CD patients and 368 controls from Northern Germany, Table 7) using the SNPlex™ system. Genotyping was successful for 16,360 assays, as defined by a mean fluorescence reading greater than 500 units on the ABI 3730×1 sequencer. Of the workable SNPs, 7,159 occurred at a minor allele frequency greater 1% and were thus included in the subsequent analyses. The markers were first ranked and prioritized for follow-up on the basis of the p-values obtained in the single-locus allele-based and genotype-based test for disease association in panel A. A p-value of 0.01 in the allele-based test was used as a cut-off for inclusion in a replication study, which resulted in 72 putative disease variants that were also evaluated in panel B (380 German CD trios, 941 single patients and 1046 independent controls, Table 7). When p<0.05 in both the TDT and the case-control comparison was held to indicate formal replication, only three markers, rs2241880 (Thr300Ala) in the ATG16L1 gene and the two previously reported variants rs1050152 (Leu503Phe) in the SLC22A4 (OCTN1) gene and rs2066845 (‘SNP12’) in the CARD15 (NOD2) gene were found to match this criterion. The newly found association of the G allele at rs2241880 with CD was significant with p=1.6×10⁻⁵ in the allele-based case-control comparison and with p=2.7×10⁻⁵ in the TDT. Thus, all subsequent mapping and replication efforts were confined to this variant. Genotyping results obtained with the SNPlex™ system were confirmed using a TaqMan® assay (99.8% genotype concordance), thus excluding artefacts due to technological problems.

[0209] 2. Follow-Up of ATG16L1 Mutation Detection and Linkage Disequilibrium Analysis

[0210] For a more comprehensive assessment of the CD risk conferred by changes in the ATG16L1 gene, a systematic search for additional mutations was carried out by re-sequencing all exons, splice sites and the promoter region of 47 CD patients. Apart from rs2241880, no further coding or splice site variants could be identified in this experiment. The CD risk associated with ATG16L1 variation was then also analysed at the haplotype level, using 28 tagging SNPs selected from the Caucasian HapMap data on the basis of r²>0.8 and a minor allele frequency greater than 1%. The localisation of the respective SNPs and their LD structure is shown in FIG. 2. When the tagging SNPs were genotyped in panel B (Table 9), the intronic SNP rs2289472 was found to have the same minor allele frequency (0.47) as coding SNP rs2241880, and to yield a slightly more significant disease association (p=1.4×10⁻⁵). This variant is localized 1082 bases upstream of exon 9 and is not located in any recognizable regulatory motif. Synonymous SNP rs13011156, on the other hand, was not found to be significantly associated with CD. In a logistic regression model, none of the tagging SNPs significantly improved the model fit in the presence of rs2241880 (all p>0.05). Together with the results of a subsequent haplotype analysis (Table 10), these findings imply that the CD risk conferred by ATG16L1 gene variation is indeed mainly due to carriership of susceptibility allele G at rs2241880.

[0211] The disease association of rs2242880 was also replicated in a UK-derived CD sample (panel C: n_{cases}=515, n_{controls}=661), using an independent TaqMan assay. The British data yielded p=0.0004 in the allele-based comparison (OR: 1.35; 95% CI: 1.14-1.59) and p=0.0001 in the genotype-based test (OR for carriership of G: 1,70; 95% CI: 1.22-2.36). In the combined analysis of all German individuals (panels A and B), the odds ratio was 1.45 (95% CI: 1.21-1.74) for heterozygous carriership of G and 1.77 (95% CI: 1.43-2.18) for homozygosity. The combined p-values for the German samples were p=4×10⁻⁸ for the allele-based and p=2×10⁻⁷ for the genotype-based test.

[0212] 3. Evaluation of rs2241880 in Ulcerative Colitis

[0213] CD-associated SNP rs2241880 was also evaluated in a sample of German patients with ulcerative colitis (UC sample, Table 7). Allele frequencies of G in cases (0.46) and controls (0.47) were virtually identical, and evidence for association was thus neither obtained from the case-control comparison (p>0.4 in both the allele- and genotype-based test) nor from the TDT (p>0.9).

### Statistical Analysis

[0214] All markers were tested for possible deviations from Hardy-Weinberg equilibrium in controls before inclusion in the association analyses. Single marker association tests and transmission disequilibrium tests (TDT) were performed using Haploview and GENOMIZER. In families with multiple affected individuals, one trio was randomly extracted for TDT analysis. Haplotype frequency estimates were obtained from singletons using an implementation of the EM algorithm (COCAPHASE). Significance testing of haplotype frequency differences was also performed with COCAPHASE and TDTPHASE, making use of the fact that twice the log-likelihood ratio between two nested data models approximately follows a χ² distribution with k degrees of freedom, where k is the difference in parameter number between the two models. Significance assessment of associations was performed using χ² or Fisher's exact test for contingency tables, as appropriate. Genotype-based logistic regression analysis was performed with R (www.r-project.org), coding individual SNP genotypes as categorical variables. Analysis of statistical interactions between risk genotypes, including Breslow-Day tests for odds ratio homogeneity, was done by means of procedure FREQ of the SAS/STAT® software package (Cary, N.C., USA).

[0215] 1. Statistical Interaction Between rs2241880 and CARD15

[0216] The ATG16L1 gene encodes a protein in the autophagosome pathway that processes intracellular bacteria. Since both the ATG16L1 and the CARD15 protein are involved in the innate defence against bacterial pathogens, the disease-associated variants in the two genes were investigated for a possible statistical interaction with respect to CD risk. To this end, individuals in the German fine mapping and replication sample (panel B) were classified as either homozygous wild-type (dd), heterozygous carrier (dD) or homozygous carrier (DD, which included compound heterozygotes) for the three main causative CARD15 SNPs rs2066844 (R702W), rs2066845 (G908R) and rs2066847 (L1007fs). Appropriateness of this classification is supported by the published haplotype structure of the CARD15 gene. The frequency and odds ratio for individual CARD15 risk genotypes, stratified by rs2241880 genotype, are shown in Table 8. A statistical interaction clearly became apparent between rs2241880 and the CARD15 low-risk genotypes dd and Dd. Thus, carriership of rs2241880 allele G was found to be a risk factor for CD only in the presence of CARD15 genotype dd, but not dD. However, the odds ratio difference was only significant for rs2241880 genotype GG (2.03 versus 1.04; Breslow-Day χ²=4.267, 1 d.f., p=0.039), and not for AG. On the background of CARD15 high-risk genotype DD, the risk conferred by carriership of the rs2241880 allele G appeared to be higher than in the presence of dd or Dd, but the confidence intervals of the respective odds ratios were still wide owing to the small number of DD controls (Table 9). Nevertheless, when rs2241880 genotypes GG and AG were combined, the joint OR of 5.89 (95% CI: 1.23-29.21) was found to be statistically significantly larger than unity (Fisher's exact two-sided p=0.016), thereby confirming that rs2241880 allele G is a risk factor on a high-risk CARD15 genotype background as well

### In Silico Protein Analysis

[0217] Aligned sequences were retrieved from the UniProt and Ensembl databases (www.uniprot.org and www.ensembl.org) and protein domain architectures from the Pfam database (www.sanger.ac.uk/Software/Pfam/). To predict the 3D structure of the ATG16L1 gene product, we explored the fold recognition results returned by the BioInfoBank online meta-server and the FFAS03 and Arby web servers. Based upon their very similar predictions, a sequence-structure alignment of ATG16L1 to the crystal structure of yeast CDC4 (FIG. 8) was constructed for the 3D-modeling server WHAT IF (http://swift.cmbi.kun.nl/WIWWWI/), which returned a structural model of the ATG16L1 WD-repeat domain.

[0218] We retrieved protein sequences from the UniProt (http://www.uniprot.org) and Ensembl (http://www.ensembl.org) databases. Protein domain architectures were taken from the Pfam database (http://www.sanger.ac.uk/Software/Pfam/). 3D crystal structure coordinates were obtained from the Protein Data Bank (http://www.pdb.org/) and corresponding domain definitions from the SCOP database (http://scop.mrc-lmb.cam.ac.uk/scop/index.html). Ensembl identifiers, UniProt accession numbers, and PDB codes are listed in Figure C-E, respectively.

[0219] Using the alignment program MUSCLE (http://www.drive5.com/muscle/), we computed multiple sequence alignments of ATG16L1 homologs contained in the Ensembl family ATG16L1 (identifier ENSF00000001431) and the Pfam family APG16 (accession number PF08614). To analyze the alignments further, we included evolutionarily related WD-repeat proteins with known 3D structures: yeast cell division control protein 4 (CDC4), yeast SIR4-interacting protein 2 (SIR2), yeast glucose repression regulatory protein 1 (TUP1), and human transducin-like enhancer protein 1 (TLE1). The alignments were manually refined based on multiple sequence alignments of the WD40 Pfam family (accession number PF00400), the published WD-repeat consensus sequence, and structure superpositions of WD-repeat proteins using FATCAT (http://fatcat.ljcrf.edu/). The alignment figures were prepared and illustrated using the editors GeneDoc (http://www.psc.edu/biomed/genedoc/), Jalview (http://www.jalview.org), and SeaView (http://pbil.univ-lyon1.fr/software/seaview.html).

[0220] The secondary structure assignment to PDB structures was obtained from the DSSP database (http://www.cmbi.kun.nl/gv/dssp/). To predict the secondary structure of ATG16L1 homologs in different species, we contacted the prediction servers PSIPRED (http://bioinf.cs.ucl.ac.uk/psipred/), YASPIN (http://ibivu.cs.vu.nl/programs/yaspinwww/), PROFsec (http://www.predictprotein.org), and Porter (http://distill.ucd.ie/porter/). We also formed consensus predictions by majority voting. All servers consistently predicted β-strands characteristic of eight WD repeats in ATG16L1, and a helical linker may precede the eighth WD-repeat as it is the case for CDC4.

[0221] To predict the three-dimensional WD-repeat domain structure of human ATG16L1, we investigated the fold recognition results returned by the BioInfoBank online meta-server (http://bioinfo.pl/meta/) and compared them to the very similar predictions by the web servers FFAS03 (http://ffas.ljcrf.edu) and Arby (http://arby.bioinf.mpi-inf.mpg.de/arby/jsp/index.jsp). The BioInfoBank server contacts a dozen other structure prediction servers and is coupled to a 3D-Jury system that assesses the quality of the returned results based on a sophisticated scoring scheme. FFAS03 and ARBY also provide statistically derived confidence scores for structure predictions. In agreement with the WD40 Pfam family classification, all servers predicted at least seven WD repeats at the C-terminus of ATG16L1 starting near residue P311. In addition, the secondary structure predictions for human ATG16L1 and its species homologs as well as the conservation of amino acids characteristic of WD repeats indicated an eighth non-canonical WD repeat in the 40-residue region P271-V310.

[0222] Since diverged WD repeats have already been observed with other WD-repeat proteins such as CDC4, SIF2, and coronin-1, we chose the eight-bladed β-propeller structure of the WD-repeat domain from the CDC4 subunit of the yeast SCF ubiquitin ligase complex as structural template for ATG16L1. Because the WD-repeat domain of ATG16L1 is replaced by an actin domain in the ATG16L1 homolog of Ustilago maydis (UniProt accession number Q4P303), one may speculate that the WD-repeat domain of human ATG16L1 is involved in actin regulation like coronin proteins with a domain architecture similar to ATG16L1. To model the 3D protein structure of ATG16L1, we extracted a pairwise sequence-structure alignment from the manually curated multiple alignment of ATG16L1 and WD-repeat domain homologs and submitted it to the WHAT IF server (http://swift.cmbi.kun.nl/WIWWWI/. The image of the resulting full-atom protein structure model was illustrated using Yasara (http://www.yasara.org) and POV-Ray (http://www.povray.org).

### Functional Studies

[0223] 1. Isolation of Primary Epithelial Cells

[0224] Epithelial cell preparation was carried out using a standard protocol as described. In brief, mucosal biopsies were placed in 1.5 mM EDTA in Hanks balanced salt solution without calcium and magnesium (HBSS) and tumbled for 10 minutes at 37° C. The supernatant containing debris and mainly villus cells was discarded. The mucosa was incubated again with HBSS/EDTA for 10 minutes at 37° C. The supernatant was collected into a 15 ml tube. The remaining mucosa was shortly vortexed in PBS and this supernatant was also collected. It contained complete crypts, some single cells, and a small amount of debris. To separate IECs (crypts) from contaminating non-epithelial cells, the suspension was allowed to sediment for 15 minutes. The cells (mainly complete crypts) were collected and washed twice with PBS. The number and viability of the cells were determined by trypan blue exclusion. The purity of the epithelial cell preparation was checked by routine hematoxylin-eosin staining, showing more than 90% of epithelial cells.

[0225] 2. mRNA Isolation and RT-PCR

[0226] Total RNA from primary intestinal epithelial cells was isolated using the RNeasy kit from Qiagen. Some 300 ng of total RNA were reverse transcribed as described elsewhere. For investigation of tissue specific expression patterns, a commercial tissue panel was obtained from Clontech (Palo Alto, Calif., USA). Primers used for amplification of APG16L are listed in Table D (expected amplicon length: 231 bp). The following conditions were applied: denaturation for 5 min at 95° C.; 25 cycles of 30 sec at 95° C., 20 sec at 60° C., 45 sec at 72° C.; final extension for 10 min at 72° C. To confirm the use of equal amounts of RNA in each experiment, all samples were checked in parallel for β-actin mRNA expression. All amplified DNA fragments were analyzed on 1% agarose gels and subsequently documented by a BioDoc Analyzer (Biometra, Göttingen, Germany).

[0227] 3. Western Blot

[0228] Biopsies from five healthy controls without any obvious intestinal pathology and from five Crohn patients with confirmed ileal and colonic inflammation were lysed and subjected to Western blot analysis as described in Waetzig et al. 10 μg of total protein were separated by SDS polyacrylamide gel electrophoresis and transferred to PVDF membrane by standard techniques. APG16L was detected using a polyclonal anti-APG16 antibody and horseradish-peroxidase (HRP)-coupled secondary antibody.

[0229] 4. Immunohistochemistry

[0230] Paraformaldehyde-fixed paraffin-embedded biopsies from normal controls (n=5) and from patients with confirmed colonic Crohn disease (n=5) were analysed which were obtained in parallel from the same sites as the biopsies used for the expression analysis studies. Two slides of each biopsy were stained with hematoxylin-eosin for routine histological evaluation. The other slides were subjected to a citrate-based antigen retrieval procedure, permeabilized by incubation with 0.1% Triton X-100 in 0.1M phosphate-buffered saline (PBS), washed three times in PBS and blocked with 0.75% bovine serum albumin in PBS for 20 minutes. Sections were subsequently incubated with the primary antibody (anti-APG16L, ABGENT, San Diego, Calif.) at a 1:200 dilution in 0.75% BSA for 1 h at room temperature. After washing in PBS, tissue bound antibody was detected using biotinylated goat-anti rabbit (Vector Laboratory, Burlingame, Calif.) followed by HRP-conjugated avidin, both diluted at 1:100 in PBS. Controls were included using irrelevant primary antibodies as well as omitting the primary antibodies using only secondary antibodies and/or HRP-conjugated avidin. No significant staining was observed with any of these controls (data not shown). Bound antibody was detected by standard chromogen technique (Vector Laboratory) and visualized by an Axiophot microscope (Zeiss, Jena, Germany). Pictures were captured by a digital camera system (Axiocam, Zeiss).

[0231] 5. Expression and Localization of ATG16L1

[0232] Expression of the ATG16L1 gene was investigated by RT-PCR in a panel of different tissues, confirming expression in colon, small bowel, intestinal epithelial cells, and immune tissues like spleen and leukocytes (FIG. 3, panel A). Recently, the existence of multiple splice variants of ATG16L1 was reported and many splice variants are annotated in the Golden Path assembly (http://genome.ucsc.edu). In all annotated and reported splice variants, exon 9, which contains CD susceptibility variant rs2241880, is translated in the same reading frame, thus consistently leading to a Thr to Ala amino acid substitution by the SNP. In a Western Blot from colon tissue (FIG. 3, panel B), a dominant 68.2 kD protein band was identified corresponding to the annotated coding sequence AY398617 (protein accession number Q676U5). This protein sequence was therefore used for the modelling of the ATG16L1 protein (see below). Expression of ATG16L1 in the intestinal epithelium was shown by immunohistochemistry (FIG. 3, panel C) and no significant difference in expression level was detected between normal and patient tissue.

[0233] 6. Location of T300A in ATG16L1

[0234] ATG16L1 homologues are present in a wide range of eukaryotes in the same domain architecture, except for yeast ATG16 (FIG. 4). The threonine residue at position 300, which is substituted to alanine by rs2241880, is conserved across many species including mouse and rat, suggesting an important functional role of this amino acid. Human ATG16L1 is organized into an N-terminal APG16 domain consisting of coiled coils and eight C-terminal WD repeats. The 3D structure of ATG16L1 was modelled using the eight-bladed β-propeller crystal structure of the evolutionarily related WD-repeat domain in yeast CDC4 (Supplementary protein analysis methods). The location of the T300A variant in human ATG16L1 corresponds to T397 of CDC4, where it lies at the N-terminus of the WD-repeat domain in the β3 strand of the first propeller blade (FIG. 5 and FIG. 6). Therefore, the Thr to Ala amino acid change encoded by rs2241880 might have a detrimental effect on the structural stability of the affected blade and on potential binding sites nearby.

TABLE C

Primer sequences used for the
mutation detection of the ATG16L1 gene.

| | | | |
|---|---|---|---|
| Region | Primer | Sequence | Amplicon |

| | | | |
|---|---|---|---|
| Promoter | ATG16L_p2_F | 5′-CACGAAAAGCAGCTTAACAATCAAAG-3′ | 828 bp |
| | ATG16L_p2_R | 5′-AGTGACGCCAGCCTGTAGCC-3′ | |
| | ATG16L_p1_F | 5′-CACAGTGCTGACTGCATTACATGG-3′ | 829 bp |
| | ATG16L_p1_R | 5′-GCCTCAGGTTCCCGCTGAC-3′ | |
| Exon 01 | ATG16L_e01_F | 5′-TCCGGCCCTCTCGAAAATC-3′ | 505 bp |
| | ATG16L_e01_R | 5′-GGGAAAATCCTCCAAAGATAAAACG-3′ | |
| Exon 02 | ATG16L_e02_F | 5′-GGGAAGACATTCTTGCAGGTG-3′ | 536 bp |
| | ATG16L_e02_R | 5′-TGAATCCTGGCAGGTTAGATGAG-3′ | |
| Exon 03 | ATG16L_e03_F | 5′-CTGCTGGAGACACCCGAATG-3′ | 445 bp |
| | ATG16L_e03_R | 5′-TGGTGATGGGCCTCAATCTG-3′ | |
| Exon 04 | ATG16L_e04-2_F | 5′-TGGCAGGGATAGTTCCCCTTTG-3′ | 397 bp |
| | ATG16L_e04-2_R | 5′-GCTGGTAGAAAAGGATCCCAGAGTG-3′ | |
| Exon 05 | ATG16L_e05_F | 5′-TTTCCTCTCCTAATGGATTATCCTG-3′ | 600 bp |
| | ATG16L_e05_R | 5′-TTGTGGTGTATTTCCTTTTTCTAACTC-3′ | |
| Exon 06 | ATG16L_e06_F | 5′-TGATGTTATGAGTTTCGGCTTGTG-3′ | 388 bp |
| | ATG16L_e06_R | 5′-CATTAGAAGCTATGATCACACCACTGC-3′ | |
| Exon 07 | ATG16L_e07_F | 5′-TGGCAGCTCTTCCTTTTTCTCC-3′ | 433 bp |
| | ATG16L_e07_R | 5′-TGCTTCCCTCCCATTAAGCAG-3′ | |
| Exon 08 | ATG16L_e08_F | 5′-AGGCTGGGTTTTCCCTTTCC-3′ | 437 bp |
| | ATG16L_e08_R | 5′-GCACGCAGCGAGATTAAGAGG-3′ | |
| Exon 09 | ATG16L_e09_F | 5′-CTCATTTGAGTGAGGGTGCTTTTG-3′ | 537 bp |
| | ATG16L_e09_R | 5′-CCATCCCTCATGCTAGCAATCC-3′ | |
| Exon 10 | ATG16L_e10_F | 5′-AGAATCTTAGTTGACCTGGGCTAGGAG-3′ | 433 bp |
| | ATG16L_e10_R | 5′-TGCTCAAACGATCCCTTACATAAAATG-3′ | |
| Exon 11 | ATG16L_e11_F | 5′-′TCATGTTCTCTTTGTCCTGCTATTTTG-3′ | 427 bp |
| | ATG16L_e11_R | 5′-GCAGAACCCAAGGGTTTATCAGAG-3′ | |
| Exon 12 | ATG16L_e12_F | 5′-GCGAGTTGAAGCACACTCACG-3′ | 392 bp |
| | ATG16L_e12_R | 5′-GGAAACACAGATTTCCCCAAGG-3′ | |
| Exon 13 | ATG16L_e13-14_F | 5′-GAGTCACTGTGCCTGACCTGTTTC-3′ | 548 bp |
| | ATG16L_e13-14_R | 5′-CAAGCAGAGGCACCAACGTG-3′ | |
| Exon 14 | ATG16L_e15-2_F | 5′-GGCTTCATGTTTAGAGGGGCACTG-3′ | 427 bp |
| | ATG16L_e15-2_R | 5′-TTCATGGGAAAGAACAGCCAAGTG-3′ | |
| Exon 15 | ATG16L_e16_F | 5′-TGTCTTAGGGTCTGTTGATGGGAAAG-3′ | 515 bp |
| | ATG16L_e16_R | 5′-GGGGGTGGGTCACTACTAACCTG-3′ | |
| Exon 16 | ATG16L_e17-2_F | 5-CCTGAGCTGCTCCCGTGATG-3′ | 385 bp |
| | ATG16L_e17-2_R | 5′-CAATAATGGTGGCCTGCAATTATGAAC-3′ | |
| Exon 17 | ATG16L_e18_F | 5′-CGGACGGGGCTGAAATACTG-3′ | 456 bp |
| | ATG16L_e18_R | 5′-AGTGGCCCCAGCTTCTCTCC-3′ | |
| Exon 18 | ATG16L_e19_F | 5′-AGTGAGCTCCTGCCTTGTCG-3′ | 407 bp |
| | ATG16L_e19_R | 5′-CCCATTCACGGCAAAGCTAC-3′ | |

TABLE D

Primer sequences used for the amplification
of the ATG16L1 transcript (Exon 10, 11, and
12 exist in all splice variants) in the RT-PCR.

| | | | |
|---|---|---|---|
| Region | Primer | Sequence | Amplicon |

| | | | |
|---|---|---|---|
| Exon 10-12 | ATG1GL10-12_F | 5′-AACGCTGTGCAGTTCAGTCCAG-3′ | 231 bp |
| | ATG16L10-12_R | 5′-AGTGACGCCAGCCTGTAGCC-3′ | |

TABLE E
Ensembl/UniProt identifiers for ATG16L1 homologs and related WD-repeat
proteins shown in FIG. S1. PDB codes are given for the WD-repeat domain
structures CDC4, SIR2, TUP1, and TLE1.

| Protein | Species | Alignment | UniProt/Ensembl | PDB |
|---|---|---|---|---|
| ATG16L1 | Homo sapiens | ATG16L1-Ho-sa | Q676U5 | — |
| ATG16L1 | Bos taurus | ATG16L1-Bo-ta | ENSBTAP00000005140 | — |
| ATG16L1 | Canis familiaris | ATG16L1-Ca-fa | ENSCAFP00000017340 | — |
| ATG16L1 | Gallus gallus | ATG16L1-Ga-ga | ENSGALP00000002472 | — |
| ATG16L1 | Mus musculus | ATG16L1-Mu-mu | Q8C0J2 | — |
| ATG16L1 | Rattus norwegicus | ATG16L1-Ra-no | ENSRNOP00000024445 | — |
| ATG16L1 | Tetraodon | ATG16L1-Te-ni | Q4SB59 | — |
| | nigroviridis | | | |
| CDC4 | Saccharomyces | CDC4-Sa-ce | P07834 | 1nex, |
| | cerevisiae | | | chain B |
| SIF2 | Saccharomyces | SIF2-Sa-ce | P38262 | 1r5m, |
| | cerevisiae | | | chain A |
| TUP1 | Saccharomyces | TUP1-Sa-ce | P16649 | 1erj, |
| | cerevisiae | | | chain A |
| TLE1 | Homo sapiens | TLE1-Ho-sa | Q04724 | 1gxr, |
| | | | | chain A |

[0235] All publications, patents and patent applications mentioned in the specification and reference list are herein incorporated by reference in their entirety for all purposes. Various modifications and variations of the described method and system of the invention will be apparent to those skilled in the art without departing from the scope and spirit of the invention. Although the invention has been described in connection with specific preferred embodiments, it should be understood that the invention as claimed should not be unduly limited to such specific embodiments. Indeed, various modifications of the described modes for carrying out the invention that are obvious to those skilled in molecular biology, genetics, or related fields are intended to be within the scope of the following claims.

[0236] The practice of the present invention will employ, unless otherwise indicated, conventional techniques of cell biology, cell culture, molecular biology, transgenic biology, microbiology, recombinant DNA, and immunology, which are within the skill of the art. Such techniques are explained fully in the literature. See, for example, Molecular Cloning A Laboratory Manual, 2nd Ed., ed. by Sambrook, Fritsch and Maniatis (Cold Spring Harbor Laboratory Press: 1989); DNA Cloning, Volumes I and H (D. N. Glover ed., 4); Oligonucleotide Synthesis (M. J. Gait ed., 1984); Mullis et al. U.S. Pat. No. 4,683,195; Nucleic Acid Hybridization (B. D. Hames & S. J. Higgins eds. 1984); Transcription And Translation (B. D. Haines & S. J. Higgins eds. 1984); Culture Of Animal Cells (R. 1. Freshney, Alan R. Liss, Inc., 1987); Immobilized Cells And Enzymes (IRL Press, 1986); B. Perbal, A Practical Guide To Molecular Cloning (1984); the treatise, Methods In Enzymology (Academic Press, Inc., N.Y.); Gene Transfer Vectors For Mammalian Cells (J. H. Miller and M. P. Calos eds., 1987, Cold Spring Harbor Laboratory); Methods In Enzymology, Vols. 154 and 155 (Wu et al. eds.), Immunochemical Methods In Cell And Molecular Biology (Mayer and Walker, eds., Academic Press, London, 1987); Handbook Of Experimental Immunology, Volumes I-IV (D. M. Weir and C. C. Blackwell, eds., 1986); Manipulating the Mouse Embryo, (Cold Spring Harbor Laboratory Press, Cold Spring Harbor, N.Y., 1986).

[0237] The sequence listing and Tables 1-10 submitted herewith are herein incorporated by reference in their entireties and are considered to be part of the application as filed

### REFERENCES

[0238] 1. Shivananda, S. et al. Incidence of inflammatory bowel disease across Europe: is there a difference between north and south? Results of the European Collaborative Study on Inflammatory Bowel Disease (EC-IBD). Gut 39, 690-697 (1996).
[0239] 2. Probert, C. S., Jayanthi, V., Rampton, D. S. & Mayberry, J. F. Epidemiology of inflammatory bowel disease in different ethnic and religious groups: limitations and aetiological clues. Int J Colorectal Dis 11, 25-28 (1996).
[0240] 3. Podolsky, D. K. Inflammatory Bowel Disease. N Engl J Med 325, 928-937 (1991).
[0241] 4. Orholm, M. et al. Familial occurrence of inflammatory bowel disease. N Engl J Med 324, 84-88 (1991).
[0242] 5. Kuster, W., Pascoe, L., Purrmann, J., Funk, S. & Majewski, F. The genetics of Crohn disease: complex segregation analysis of a family study with 265 patients with Crohn disease and 5,387 relatives. Am J Med Genet 32, 105-108 (1989).
[0243] 6. Tysk, C., Lindberg, E., Jarnerot, G. & Floderus Myrhed, B. Ulcerative colitis and Crohn's disease in an unselected population of monozygotic and dizygotic twins. A study of heritability and the influence of smoking. Gut 29, 990-996 (1988).
[0244] 7. Thompson, N. P., Driscoll, R., Pounder, R. E. & Wakefield, A. J. Genetics versus environment in inflammatory bowel disease: results of a British twin study. BMJ 312, 95-96 (1996).
[0245] 8. Satsangi, J., Rosenberg, W. M. C. & Jewell, D. P. The prevalence of Inflammatory Bowel Disease in relatives of patients with Crohn's disease. Eur J Gastroenterol Hepatol 6, 413-416 (1994).
[0246] 9. Probert, C. S. et al. Prevalence and family risk of ulcerative colitis and Crohn's disease: an epidemiological study among Europeans and south Asians in Leicestershire. Gut 34, 1547-1551 (1993).
[0247] 10. Meucci, G. et al. Familial aggregation of inflammatory bowel disease in northern Italy: a multicenter study. The Gruppo di Studio per le Malattie Infiammatorie Intestinali (IBD Study Group). Gastroenterology 103, 514-519 (1992).
[0248] 11. Hugot, J. P. et al. Association of NOD2 leucine-rich repeat variants with susceptibility to Crohn's disease. Nature 411, 599-603 (2001).
[0249] 12. Ogura, Y. et al. A frameshift mutation in NOD2 associated with susceptibility to Crohn's disease. Nature 411, 603-606 (2001).
[0250] 13. Rioux, J. D. et al, Genetic variation in the 5q31 cytokine gene cluster confers susceptibility to Crohn disease. Nat Genet 29, 223-228. (2001).
[0251] 14. Peltekova, V. D. et al. Functional variants of OCTN cation transporter genes are associated with Crohn disease. Nat Genet 36, 471-475 (2004).
[0252] 15. Stoll, M. et al. Genetic variation in DLG5 is associated with inflammatory bowel disease. Nat Genet 36, 476-480 (2004).
[0253] 16. Brant, S. R. et al. MDR1 Ala893 polymorphism is associated with inflammatory bowel disease. Am J Hum Genet 73, 1282-1292 (2003).
[0254] 17. Ho, G. T. et al. ABCB1/MDR1 gene determines susceptibility and phenotype in ulcerative colitis: discrimination of critical variants using a gene-wide haplotype tagging approach. Hum Mol Genet 15, 797-805 (2006).
[0255] 18. Schwab, M. et al., Association between the C3435T MDR1 gene polymorphism and susceptibility for ulcerative colitis. Gastroenterology 124, 26-33 (2003).
[0256] 19. Yamazaki, K. et al. Single nucleotide polymorphisms in TNFSF15 confer susceptibility to Crohn's disease. Hum Mol Genet (2005).
[0257] 20. Maeda, S. et al. Nod2 mutation in Crohn's disease potentiates NF-kappaB activity and IL-1 beta processing. Science 307, 734-738 (2005).
[0258] 21. Kobayashi, K. S. et al. Nod2-dependent regulation of innate and adaptive immunity in the intestinal tract. Science 307, 731-734 (2005).
[0259] 22. Girardin, S. E. et al. Nod2 is a general sensor of peptidoglycan through muramyl dipeptide (MDP) detection. J Biol Chem 278, 8869-8872 (2003).
[0260] 23. Hampe, J. et al. Association between insertion mutation in NOD2 gene and Crohn's disease in German and British populations. Lancet 357, 1925-1928. (2001).
[0261] 24. Marks, D. J. et al. Defective acute inflammation in Crohn's disease: a clinical investigation. Lancet 367, 668-678 (2005).
[0262] 25. Rosenstiel, P. et al. TNF-alpha and IFN-gamma regulate the expression of the NOD2 (CARD15) gene in human intestinal epithelial cells. Gastroenterology 124, 1001-1009 (2003).
[0263] 26. Herbert, A. et al. A common genetic variant is associated with adult and childhood obesity. Science 312, 279-283 (2006).
[0264] 27. Smyth, D. J. et al. A genome-wide association study of nonsynonymous SNPs identifies a type 1 diabetes locus in the interferon-induced helicase (IFIH1) region. Nat Genet (2006).
[0265] 28. Croucher, P. J. P. et al. Haplotype structure and association to Crohn's disease of CARD15 mutations in two ethnically divergent populations. Eur J Hum Genet, in press (2003).
[0266] 29. Zheng, H. et al. Cloning and analysis of human Apg16L. DNA Seq 15, 303-305 (2004).
[0267] 30. Orlicky, S., Tang, X., Willems, A., Tyers, M. & Sicheri, F. Structural basis for phosphodependent substrate selection and orientation by the SCF^{Cdc4} ubiquitin ligase. Cell 112, 243-256 (2003).
[0268] 31. Reich, D. E. & Lander, E. S. On the allelic spectrum of human disease. Trends Genet 17, 502-510 (2001).
[0269] 32. Inohara, N. et al., Nod1, an Apaf-1-like activator of caspase-9 and nuclear factor-kappaB. J Biol Chem 274, 14560-14567 (1999).
[0270] 33. Chamaillard, M. et al. An essential role for NOD1 in host recognition of bacterial peptidoglycan containing diaminopimelic acid. Nat Immunol 4, 702-707 (2003).
[0271] 34. Codogno, P. & Meijer, A. J. Autophagy and signaling: their role in cell survival and cell death. Cell Death Differ 12 Suppl 2, 1509-1518 (2005).
[0272] 35. Mizushima, N. The pleiotropic role of autophagy: from protein metabolism to bactericide. Cell Death Differ 12 Suppl 2, 1535-1541 (2005).
[0273] 36. Deretic, V. Autophagy in innate and adaptive immunity. Trends Immunol 26, 523-528 (2005).
[0274] 37. Swanson, M. S. & Molofsky, A. B. Autophagy and inflammatory cell death, partners of innate immunity. Autophagy 1, 174-176 (2005).
[0275] 38. Kirkegaard, K., Taylor, M. P. & Jackson, W. T. Cellular autophagy: surrender, avoidance and subversion by microorganisms. Nat Rev Microbiol 2, 301-314 (2004).
[0276] 39. Ogawa, M. et al. Escape of intracellular Shigella from autophagy. Science 307, 727-731 (2005).
[0277] 40. Mizushima, N. et al. Mouse Apg16L, a novel WD-repeat protein, targets to the autophagic isolation membrane with the Apg12-Apg5 conjugate. J Cell Sci 116, 1679-1688 (2003).
[0278] 41. Kuma, A., Mizushima, N., Ishihara, N. & Ohsumi, Y. Formation of the approximately 350-kDa Apg12-Apg5 Apg16 multimeric complex, mediated by Apg16 oligomerization, is essential for autophagy in yeast. J Biol Chem 277, 18619-18625 (2002).
[0279] 42. Mizushima, N., Yoshimori, T. & Ohsumi, Y. Role of the Apg12 conjugation system in mammalian autophagy. Int J Biochem Cell Biol 35, 553-561 (2003).
[0280] 43. Li, D. & Roberts, R. WD-repeat proteins: structure characteristics, biological function, and their involvement in human diseases. Cell Mol Life Sci 58, 2085-2097 (2001).
[0281] 44. Schreiber, S., Rosenstiel, P., Albrecht, M., Hampe, J. & Krawczak, M. Genetics of Crohn disease, an archetypal inflammatory barrier disease. Nat Rev Genet 6, 376-388 (2005).
[0282] 45. Ott, S. J. et al. Reduction in diversity of the colonic mucosa associated bacterial microflora in patients with active inflammatory bowel disease. Gut 53, 685-693 (2004).
[0283] 46. Swidsinski, A. et al. Mucosal flora in inflammatory bowel disease. Gastroenterology 122, 44-54 (2002).
[0284] 47. Lennard-Jones, J. E. Classification of inflammatory bowel disease. Scand J Gastroenterol Suppl 170, 2-6 (1989).
[0285] 48. Truelove, S. C. & Pena, A. S. Course and prognosis of Crohn's disease. Gut 17, 192-201 (1976).
[0286] 49. Curran, M. E. et al. Genetic Analysis of Inflammatory Bowel Disease in a Large European Cohort Supports Linkage to Chromosomes 12 and 16. Gastroenterology 115, 1066-1071 (1998).
[0287] 50. Hampe, J. et al. A genome-wide analysis provides evidence for novel linkages in Inflammatory Bowel Disease in a large European cohort. Am J Hum Genet 64, 808-816 (1999).
[0288] 51. Hampe, J. et al. The interferon gamma gene as a positional and functional candidate gene for inflammatory bowel disease. Intl J Colorectal Dis 13, 260-263 (1998).
[0289] 52. Krawczak, M., Nikolaus, S., von Eberstein, H., El Mokhtari, N. E. & Schreiber, S. PopGen: Population-based recruitment of patients and controls for the analysis of complex genotype-phenotype relationships. Community Genet 9, 55-61 (2006).
[0290] 53. Onnie, C. M. et al. Associations of allelic variants of the multidrug resistance gene (ABCB1 or MDR1) and inflammatory bowel disease and their effects on disease behavior: a case-control and meta-analysis study. Inflamm Bowel Dis 12, 263-271 (2006).
[0291] 54. Venter, J. C. et al., The sequence of the human genome. Science 291, 1304-1351 (2001).
[0292] 55. Tobler, A. R. et al. The SNPlex genotyping system: a flexible and scalable platform for SNP genotyping. J Biomol Tech 16, 398-406 (2005).
[0293] 56. Hampe, J. et al., An integrated system for high throughput TaqMan based SNP genotyping. Bioinformatics 17, 654-655. (2001).
[0294] 57. Hampe, J. et al. Evidence for a NOD2-independent susceptibility locus for inflammatory bowel disease on chromosome 16p. Proc Natl Acad Sci USA 99, 321-326. (2002).
[0295] 58. Manaster, C. et al. InSNP: a tool for automated detection and visualization of SNPs and InDels. Hum Mutat 26, 11-19 (2005).
[0296] 59. Weckx, S. et al. novoSNP, a novel computational tool for sequence variation discovery. Genome Res 15, 436-442 (2005).
[0297] 60. Barrett, J. C., Fry, B., Mailer, J. & Daly, M. J. Haploview: analysis and visualization of LD and haplotype maps. Bioinformatics 21, 263-265 (2005).
[0298] 61. Franke, A. et al. GENOMIZER: an integrated analysis system for genome-wide association data. Hum Mutat 27, 583-588 (2006).
[0299] 62. Dudbridge, F. Pedigree disequilibrium tests for multilocus haplotypes. Genet Epidemiol 25, 115-121 (2003).
[0300] 63. Waetzig, G. H. et al. Soluble tumor necrosis factor (TNF) receptor-1 induces apoptosis via reverse TNF signaling and autocrine transforming growth factor-beta1. Faseb J 19, 91-93 (2005).
[0301] Kerlavage, A. et al. The Celera Discovery System. Nucleic Acids Res 30, 129-36 (2002).
[0302] Venter, J. C. et al. The sequence of the human genome. Science 291, 1304-51 (2001).
[0303] Sherry, S. T. et al. dbSNP: the NCBl database of genetic variation. Nucleic Acids Res 29, 308-11 (2001).
[0304] Hirakawa, M. et al. JSNP: a database of common gene variations in the Japanese population. Nucleic Acids Res 30, 158-62 (2002).
[0305] Stenson, P. D. et al. Human Gene Mutation Database (HGMD): 2003 update. Hum Mutat 21, 577-81 (2003).
[0306] Adams, M. et al. Applied genomics: exploring functional variation and gene expression. Am. J. Hum. Genet. 71, 203 (2002).
[0307] Bustamante, C. D. et al. Natural selection on protein-coding genes in the human genome Nature 437, 1153-7 (2005).
[0308] Thomas, P. D. & Gilbert, D. Beyond Serendipity. The Scientist 16, 12 (2002).
[0309] Marth, G. et al. Single-nucleotide polymorphisms in the public domain: how useful are they? Nat Genet 27, 371-2 (2001).
[0310] De La Vega, F. M. et al. New generation pharmacogenomic tools: a SNP linkage disequilibrium Map, validated SNP assay resource, and high-throughput instrumentation system for large-scale genetic studies. Biotechniques Suppl, 48-50, 52, 54 (2002).
[0311] De La Vega, F. M. et al. The linkage disequilibrium maps of three human chromosomes across four populations reflect their demographic history and a common underlying recombination pattern. Genome Res 15, 454-62 (2005).
[0312] Reich, D. E., Gabriel, S. B. & Altshuler, D. Quality and completeness of SNP databases. Nat Genet 33, 457-8 (2003).
[0313] Pruitt, K. D. & Maglott, D. R. RefSeq and LocusLink: NCBI gene-centered resources. Nucleic Acids Res 29, 137-40 (2001).
[0314] Hubbard, T. et al. The Ensembl genome database project. Nucleic Acids Res 30, 38-41 (2002).
[0315] Tobler, A. R. et al. The SNPlex Genotyping System: A Flexible and Scalable Platform for SNP Genotyping. J. Biomolec. Tech. 16, 398-406 (2005).
[0316] Thomas, P. D. et al. PANTHER: a library of protein families and subfamilies indexed by function. Genome Res 13, 2129-41 (2003).
[0317] Cho, R. J. & Campbell, M. J. Transcription, genomes, function. Trends Genet 16, 409-15 (2000).

[0318] Thomas, P. D. & Kejariwal, A. Coding single-nucleotide polymorphisms associated with complex vs. Mendelian disease: evolutionary evidence for differences in molecular effects. Proc Natl Acad Sci USA 101, 15398-403 (2004).

### SUPPLEMENTAL REFERENCES FOR IN SILICO PROTEIN ANALYSIS

[0319] Wu, C. H. et al. The Universal Protein Resource (UniProt): an expanding universe of protein information. Nucleic Acids Res 34, D187-91 (2006).
[0320] Birney, E. et al. Ensembl 2006. Nucleic Acids Res 34, D556-61 (2006).
[0321] Finn, R. D. et al. Pfam: clans, web tools and services. Nucleic Acids Res 34, D247-51 (2006).
[0322] Kouranov, A. et al. The RCSB PDB information portal for structural genomics. Nucleic Acids Res 34, D302-5 (2006).
[0323] Andreeva, A. et al. SCOP database in 2004: refinements integrate structure and sequence family data. Nucleic Acids Res 32, D226-9 (2004).
[0324] Edgar, R. C. MUSCLE: multiple sequence alignment with high accuracy and high throughput. Nucleic Acids Res 32, 1792-7 (2004).
[0325] Orlicky, S., Tang, X., Willems, A., Tyers, M. & Sicheri, F. Structural basis for phosphodependent substrate selection and orientation by the SCFCdc4 ubiquitin ligase. Cell 112, 243-56 (2003).
[0326] Cerna, D. & Wilson, D. K. The structure of Sif2p, a WD repeat protein functioning in the SET3 corepressor complex. J Mol Biol 351, 923-35 (2005).
[0327] Sprague, E. R., Redd, M. J., Johnson, A. D. & Wolberger, C. Structure of the C-terminal domain of Tup1, a corepressor of transcription in yeast. Embo J 19, 3016-27 (2000).

[0328] Pickles, L. M., Roe, S. M., Hemingway, E. J., Stifani, S. & Pearl, L. H. Crystal structure of the C-terminal WD40 repeat domain of the human Groucho/TLE1 transcriptional corepressor. Structure 10, 751-61 (2002).
[0329] Li, D. & Roberts, R. WD-repeat proteins: structure characteristics, biological function, and their involvement in human diseases. Cell Mol Life Sci 58, 2085-97 (2001).
[0330] Smith, T. F., Gaitatzes, C., Saxena, K. & Neer, E. J. The WD repeat: a common architecture for diverse functions. Trends Biochem Sci 24, 181-5 (1999).
[0331] Ye, Y. & Godzik, A. FATCAT: a web server for flexible structure comparison and structure similarity searching. Nucleic Acids Res 32, W582-5 (2004).
[0332] Nicholas, K., Nicholas, H. & Deerfield, D. GeneDoc: Analysis and visualization of genetic variation. EMBNEW. NEWS 4, 14 (1997).
[0333] Clamp, M., Cuff, J., Searle, S. M. & Barton, G. J. The Jalview Java alignment editor. Bioinformatics 20, 426-7 (2004).
[0334] Galter, N., Gouy, M. & Gautier, C. SEAVIEW and PHYLO_WIN: two graphic tools for sequence alignment and molecular phylogeny. Comput Appl Biosci 12, 543-8 (1996).
[0335] Kabsch, W. & Sander, C. Dictionary of protein secondary structure: pattern recognition of hydrogen-bonded and geometrical features. Biopolymers 22, 2577-637 (1983).
[0336] McGuffin, L. J., Bryson, K. & Jones, D. T. The PSIPRED protein structure prediction server. Bioinformatics 16, 404-5 (2000).
[0337] Pyo, J. O. et al. Essential roles of Atg5 and FADD in autophagic cell death: dissection of autophagic cell death into vacuole formation and cell death. J Biol Chem 280, 20722-9 (2005).
[0338] Rosl, B., Yachdav, G. & Liu, J. The Predict Protein server. Nucleic Acids Res 32, W321-6 (2004).
[0339] Albrecht, M., Tosatto, S. C., Lengauer, T. & Valle, G. Simple consensus procedures are effective and sufficient in secondary structure prediction. Protein Eng 16, 459-62 (2003).
[0340] Bujnicki, J. M., Elofsson, A., Fischer, D. & Rychlewski, L. Structure prediction meta server. Bioinformatics 17, 750-1 (2001).
[0341] Jaroszewski, L., Rychlewski, L., Li, Z., Li, W. & Godzik, A. FFAS03: a server for profile-profile sequence alignments. Nucleic Acids Res 33, W284-8 (2005).
[0342] von Öhsen, N., Sommer, I., Zimmer, R. & Lengauer, T. Arby: automatic protein structure prediction using profile-profile alignment and confidence measures. Bioinformatics 20, 2228-35 (2004).
[0343] Ginalski, K. & Rychlewski, L. Detection of reliable and unexpected protein fold predictions using 3D-Jury. Nucleic Acids Res 31, 3291-2 (2003).
[0344] Appleton, B. A., Wu, P. & Wiesmann, C. The crystal structure of murine coronin-1: a regulator of actin cytoskeletal dynamics in lymphocytes. Structure 14, 87-96 (2006).
[0345] Rodriguez, R., Chinea, G., Lopez, N., Pons, T. & Vriend, G. Homology modeling, model and software evaluation: three related resources. Bioinformatics 14, 523-8 (1998).
[0346] Rybakin, V. & Clemen, C. S. Coronin proteins as multifunctional regulators of the cytoskeleton and membrane trafficking. Bioessays 27, 625-632 (2005).

### BOOKS

[0347] Abbas A K, Litchman A H. Cellular and Molecular Immunology. Philadelphia: Saunders; 1994. 417 p.
[0348] Austen B M and Westwood O M R. Protein Targeting and Secretion. Oxford: IRL Press; 1991.85 p.
[0349] Bishop M J, editor. Guide to Human Genome Computing, 2d ed. San Diego: Academic Press; 1998. 306 p.
[0350] Cowell I G, Austin C A, editors. DNA Library Protocols. Methods in Molecular Biology. Vol. 69 Totowa, N.J.: Humana Press; 1997. 321 p.
[0351] Freshney R I, editor. Animal Cell Culture: A Practical Approach. Oxford: IRL Press; 1986.
[0352] Freshney R I. Culture Of Animal Cells: A Manual of Basic Technique. New York: AR Liss; 1987. 397 p.
[0353] Glover D M, editor. DNA Cloning: A Pratical Approach. Vols 1 & 2. Oxford; Washington: IRL Press; 1985.
[0354] Gribskov M, Devereux J, editors. Sequence Analysis Primer. Oxford University Press; 1994. 296 p.
[0355] Griffin A M, Griffin H G, editors. Computer Analysis of Sequence Data, Part 1. Totowa, N.J. Humana Press; 1994. 392 p.
[0356] Hames B D, Higgins S J, editors. Nucleic Acid Hybridization: A Practical Approach. Oxford: IRL Press; 1985. 245 p.
[0357] Hames B D, Higgins S J, editors. Transcription and Translation: A Practical Approach. Oxford: IRL Press; 1984. 328 p.
[0358] Harlow Ed, Lane D. Antibodies: A Laboratory Manual. New York: Cold Spring Harbor Laboratory; 1988. 726 p.
[0359] Heinje G. von. Sequence Analysis in Molecular Biology. San Diego: Academic Press; 1987. 188 p.

[0360] Hogan B, Costantini F, Lacy E, editors. Manipulating the Mouse Embryo: A Laboratory Manual. New York: Cold Spring Harbor Laboratory Press; 1986. 332 p.
[0361] Huber B E, Carr B I. Molecular and Immunologic Approaches. Mt. Kisco, N.Y.: Futura Publishing Co; 1994.
[0362] Jones J. Amino Acid and Peptide Synthesis. Oxford; New York: Oxford Science Publications; 1992. 86 p.
[0363] Kaufman P B, William W, Donghern K, editors. Handbook of Molecular and Cellular Methods in Biology and Medicine. Boca Raton: CRC Press; 1995. 484 p.
[0364] Lesk A M, editor. Computational Molecular Biology: sources and methods for sequence analysis. New York: Oxford University Press; 1988. 254 p.
[0365] Male D, Cooke A, Owen M, Trowsdale J, Champion B, editors. Advanced Immunology. 3rd ed. London; Baltimore: Mosby; 1996. 273 p.
[0366] McPherson M J, editor. Directed Mutagenesis: A Practical Approach. New York: IRL Press; 1991. 257 p.
[0367] McPherson M J, Quirke P, Taylor J R, editors. PCR: A Practical Approach. Oxford; New York: IRL Press; 1991. 253 p.
[0368] Miller J H, Calos M P, editors. Gene Transfer Vectors for Mammalian Cells. New York: Cold Spring Harbor Laboratory Press; 1987. 169 p.
[0369] Miller J H, Calos M P, editors. Gene Transfer Vectors For Mammalian Cells. New York: Cold Spring Harbor Laboratory; 1987. 169 p.
[0370] Pawlowitzki I H, Edwards J H, Thompson E A, editors. Genetic Mapping of Disease Genes. Academic Press London; 1997. 288 p.
[0371] Perbal B V. A Practical Guide to Molecular Cloning. 1st ed. New York: Wiley Interscience Publication; 1984. 554 p.

[0372] Perbal B V. A Practical Guide To Molecular Cloning. New York: Wiley; 1984. 554 p.
[0373] Peruski L F, Peruski A H. The Internet and the New Biology. Tools for Genomic and Molecular Research. Washington, D.C.: American Society for Microbiology Press; 1997.
[0374] Sambrook J. Molecular Cloning: A Laboratory Manual. 2nd ed, 3 vols. New York; Cold Spring Harbor Laboratory Press; 1989.
[0375] Sell S. Immunology, Immunopathology & Immunity. 5th ed. Stamford, Conn.: Appleton & Lange; 1996. 1014 p.
[0376] Smith D W, editor. Biocomputing. Informatics and Genome Projects, New York: Academic Press; 1993. 336 p.
[0377] Stites D P, Terr A T, editors. Basic and Clinical Immunology. 7th ed. Norwalk, Conn.: Appleton & Lange; 1991. 870 p.
[0378] Walker J M. Protein Protocols on Crohn disease-ROM, Humana Press, Totowa, N.J.

[0379] Weir D M, Herzenberg L A, Blackwell C, editors. Handbook Of Experimental Immunology. 4 vols. Oxford: Blackwell; 1986.
[0380] Woodward J. Immobilized Cells And Enzymes: A Practical Approach. Oxford: IRL Press; 1986.
[0381] Wu R, Grossman L, editors. Methods in Enzymology: Rexcombinant DNA Part E. Vol. 154. Amsterdam: Elsevier Science; 1987. 576 p.
[0382] Wu R, Grossman L, editors. Methods in Enzymology: Rexcombinant DNA Part F. Vol. 155. Amsterdam: Elsevier Science; 1987. 628 p.

### PATENTS

[0383] U.S. Pat. No. 4,683,202.
[0384] U.S. Pat. No. 4,952,501.
[0385] W003042661A2
[0386] US 20040009479A1
[0387] U.S. Pat. No. 5,315,000
[0388] W01997US0005216
[0389] U.S. Pat. No. 5,498,531
[0390] U.S. Pat. No. 5,807,718
[0391] U.S. Pat. No. 5,888,819
[0392] U.S. Pat. No. 6,090,543
[0393] U.S. Pat. No. 6,090,606
[0394] U.S. Pat. No. 5,585,089
[0395] U.S. Pat. No. 4,683,195
[0396] U.S. Pat. No. 4,683,202
[0397] U.S. Pat. No. 5,459,039.
[0398] U.S. Pat. No. 6,090,543).
[0399] U.S. Pat. No. 6,090,606
[0400] U.S. Pat. No. 5,869,242
[0401] U.S. 60/335,068
[0402] U.S. Pat. No. 6,479,244
[0403] PCT/US94/05700
[0404] U.S. Pat. No. 4,797,368
[0405] WO 93/24641
[0406] U.S. Pat. No. 5,173,414

TABLE 1
Crohn disease candidate regions identified from the genome
wide scan association analyses in the QFP. The first column
denotes the region identifier. The second and third columns
correspond to the chromosome and cytogenetic band,
respectively. The fourth and fifth columns correspond to the
chromosomal start and end coordinates of the NCBI genome
assembly derived from build 35 (B35).

| Region | Chromosome | Cytogenetic Band | B35 Start | B35 End |
|---|---|---|---|---|
| 1 | 2 | 2q37.1 | 233464306 | 234464305 |

TABLE 2

| | | | | | | | | | | | | | | | | Single Type | |
|---|---|---|---|---|---|---|---|---|---|---|---|---|---|---|---|---|---|
| | | | | | | LDSTATS v2 | | | | | LDSTATS v4 | | | | | Single | |
| | | | | | | | | | | | | | | | | Genotype | |
| Region | | B35 | | Seq | | Single | | | | | Single | | | | | Likelihood | Single Allele |
| ID | Chr | Position | RS# | ID | Flanking Sequence | Marker | W03 | W05 | W07 | W09 | Marker | W03 | W05 | W07 | W09 | Ratio | Likelihood Ratio |
| 1 | 2 | 233466588 | 737027 | 223 | TAGCTCTGTTSCTATTTGCCA | 0.282 | 0.054 | 0.031 | 1.278 | 1.103 | 0.263 | 0.010 | 0.025 | 1.277 | 0.083 | 0.134 | 0.253 |
| 1 | 2 | 233505149 | 1867778 | 224 | AAAAGTGGTGYTAGAAAACTT | 0.182 | 0.152 | 0.008 | 0.194 | 2.506 | 0.155 | 0.070 | 0.001 | 0.188 | 2.277 | 0.082 | 0.219 |
| 1 | 2 | 233515765 | 2344614 | 225 | ATGTGTCAGCRGTTGCTTCTT | — | — | — | — | — | — | — | — | — | — | — | — |
| 1 | 2 | 233521207 | 7587309 | 226 | GTGTTTACCAKGTAGTGTGCT | 0.182 | 0.031 | 0.152 | 0.575 | 0.476 | 0.169 | 0.028 | 0.153 | 0.580 | 0.479 | 0.081 | 0.182 |
| 1 | 2 | 223544313 | 2044449 | 227 | TAAGATACACRTGAAGTCAAT | — | — | — | — | — | — | — | — | — | — | — | — |
| 1 | 2 | 233956749 | 809639 | 228 | ATAACTGATASGTTTTGAGAA | 0.196 | 0.035 | 0.201 | 0.590 | 0.564 | 0.179 | 0.017 | 0.213 | 0.596 | 0.574 | 0.268 | 0.196 |
| 1 | 2 | 233606587 | 2344912 | 229 | AAGAAGTAGCRGAGCTGAGAA | — | — | — | — | — | — | — | — | — | — | — | — |
| 1 | 2 | 233617614 | 2676960 | 230 | ACCGGGTGATKCATTTCCACA | — | — | — | — | — | — | — | — | — | — | — | — |
| 1 | 2 | 233635802 | 4973560 | 231 | GGTGCCAGCCRCCACCAGAAG | 0.397 | 0.853 | 0.265 | 0.131 | 0.467 | 0.395 | 0.874 | 0.233 | 0.138 | 0.451 | 0.598 | 0.397 |
| 1 | 2 | 233644264 | 4973583 | 232 | TCCTATTGGCRTGAGGATAAC | — | — | — | — | — | — | — | — | — | — | — | — |
| 1 | 2 | 233661159 | 7583124 | 233 | AAAACCATAAYGATTGGTGTT | 1.177 | 0.326 | 0.112 | 0.109 | 0.211 | 1.076 | 0.328 | 0.092 | 0.117 | 0.212 | 0.802 | 1.177 |
| 1 | 2 | 233671260 | 4973591 | 234 | TCTCGCTATCRTCTTCTGCCT | 0.107 | 0.365 | 0.150 | 0.197 | 0.259 | 0.094 | 0.375 | 0.154 | 0.205 | 0.239 | 0.147 | 0.107 |
| 1 | 2 | 233687921 | 5437082 | 235 | CACTGCTTCCMGCCACCCTGC | — | — | — | — | — | — | — | — | — | — | — | — |
| 1 | 2 | 233691534 | 684089 | 236 | ATAAGCCTCTSCCTTCTGGAA | — | — | — | — | — | — | — | — | — | — | — | — |
| 1 | 2 | 233713472 | 5437084 | 237 | AAGCGGGGTGYGATGTTTGGA | 0.000 | 0.124 | 0.228 | 0.307 | 0.061 | 0.000 | 0.134 | 0.260 | 0.300 | 0.066 | 0.287 | 0.000 |
| 1 | 2 | 233739452 | 4405750 | 238 | CAGGGCAGGGYTTGGGGCTGG | — | — | — | — | — | — | — | — | — | — | — | — |
| 1 | 2 | 233751966 | 5437087 | 239 | GGTTAAGTGAKTGACAACAGT | — | — | — | — | — | — | — | — | — | — | — | — |
| 1 | 2 | 233760103 | 4973055 | 240 | TGTTTTTAAGRCTCTTGATAC | 0.822 | 0.258 | 0.144 | 0.137 | 0.484 | 0.772 | 0.248 | 0.151 | 0.126 | 0.452 | 0.566 | 0.822 |
| 1 | 2 | 233776237 | 7608422 | 241 | CTGGGGAATGRGATGCAAGTG | 0.392 | 0.251 | 0.112 | 0.392 | 0.097 | 0.345 | 0.224 | 0.107 | 0.423 | 0.099 | 0.168 | 0.391 |
| 1 | 2 | 233788755 | 6437097 | 242 | CCTCCTATAAMATCCACTCCT | 0.276 | 0.336 | 0.072 | 0.127 | 0.009 | 0.240 | 0.342 | 0.087 | 0.125 | 0.096 | 0.345 | 0.276 |
| 1 | 2 | 233803717 | 6605277 | 243 | TTAAGAACAMACATTTTGGA | — | — | — | — | — | — | — | — | — | — | — | — |
| 1 | 2 | 233803717 | 7605743 | 244 | AGGCCCCATGKTTCCACCTGC | — | — | — | — | — | — | — | — | — | — | — | — |
| 1 | 2 | 233626871 | 6756920 | 245 | GTACCAACTAYCTGCAAGGCA | 1.054 | 0.419 | 0.074 | 0.065 | 0.109 | 0.972 | 0.426 | 0.082 | 0.076 | 0.194 | 0.674 | 0.154 |
| 1 | 2 | 233858566 | 7581787 | 246 | TTCTTTACGAMCACTGAAATT | — | — | — | — | — | — | — | — | — | — | — | — |
| 1 | 2 | 233862263 | 6431239 | 247 | GAGAGTGGCCRGTCCTAGATG | 0.669 | 0.494 | 0.331 | 0.084 | 0.206 | 0.628 | 0.497 | 0.310 | 0.090 | 2.220 | 0.668 | 0.669 |
| 1 | 2 | 233883168 | 3924334 | 248 | TGGTATTAGAWGAAACACATT | — | — | — | — | — | — | — | — | — | — | — | — |
| 1 | 2 | 233697739 | 14243 | 249 | AACACTCATGRTGTGCCAAGT | 0.068 | 0.473 | 1.179 | 0.356 | 0.031 | 0.049 | 0.465 | 1.151 | 0.355 | 0.03. | 0.024 | 0.109 |
| 1 | 2 | 233905010 | 7580869 | 250 | CCCCAGAAACRGACTCTGAGT | 0.649 | 1.136 | 0.442 | 0.480 | 0.242 | 0.609 | 1.129 | 0.463 | 0.472 | 0.260 | 0.384 | 0.649 |
| 1 | 2 | 233922610 | 7564252 | 251 | TCTCTTTTGGTGAGAAATGGA | — | — | — | — | — | — | — | — | — | — | — | — |
| 1 | 2 | 233949234 | 6431660 | 252 | ATTGAAAACTRAAAACATTTC | 2.602 | 1.385 | 0.600 | 1.061 | 0.808 | 2.396 | 1.383 | 0.598 | 1.067 | 0.780 | 2.000 | 2.570 |
| 1 | 2 | 233962638 | 3792110 | 253 | TACTTTGACCWGGTTTAACTT | — | — | — | — | — | — | — | — | — | — | — | — |
| 1 | 2 | 233966113 | 6861 | 254 | AGGAGTCAGGYGGCCTTCCCA | 0.467 | 1.059 | 0.651 | 0.865 | 0.744 | 0.442 | 1.154 | 0.665 | 0.847 | 0.775 | 0.414 | 0.439 |
| 1 | 2 | 234002157 | 6431282 | 255 | ACCCTGGAGCYGGCCTCCTCT | 0.662 | 0.521 | 0.821 | 0.453 | 2.825 | 0.589 | 0.543 | 0.790 | 0.480 | 0.817 | 0.354 | 0.662 |
| 1 | 2 | 234037548 | 1046976 | 256 | AAGAATGACGYTGATGAGTGA | — | — | — | — | — | — | — | — | — | — | — | — |
| 1 | 2 | 234046846 | 1550532 | 257 | ATATTTGAACSTTGCGTCTAG | 0.214 | 0.406 | 0.269 | 0.712 | 0.849 | 0.189 | 0.874 | 0.275 | 0.736 | 0.849 | 0.605 | 0.243 |
| 1 | 2 | 234066744 | 838709 | 258 | AACCACAGAGMGCATGTGTGT | 0.304 | 0.307 | 0.427 | 0.344 | 0.676 | 0.289 | 0.317 | 0.433 | 0.313 | 0.681 | 0.588 | 0.304 |
| 1 | 2 | 234075861 | 4663580 | 259 | TGGAGACTTGYGCTTCCCCCC | — | — | — | — | — | — | — | — | — | — | — | — |
| 1 | 2 | 234103752 | 638732 | 260 | CTTTAAAAAAYAGAGAGTCAG | 0.605 | 0.108 | 0.116 | 0.196 | 0.273 | 0.565 | 0.112 | 0.123 | 0.228 | 0.265 | 0.407 | 0.605 |
| 1 | 2 | 234142638 | 2228938 | 261 | CTGGTTCCTTGCCCGGTGGCT | — | — | — | — | — | — | — | — | — | — | — | — |
| 1 | 2 | 234169621 | 2971664 | 262 | CTGGGGAACTRTTGGATGTCT | 0.287 | 0.157 | 0.022 | 0.029 | 0.148 | 0.241 | 0.150 | 0.025 | 0.030 | 0.149 | 0.143 | 0.287 |
| 1 | 2 | 234207819 | 6431482 | 263 | TCAGTAGAATRGCCATGTTGG | — | — | — | — | — | — | — | — | — | — | — | — |
| 1 | 2 | 234222393 | 6716988 | 264 | AAAATGATGGYTATTCTCATT | 0.287 | 0.039 | 0.037 | 0.063 | 0.028 | 0.246 | 0.038 | 0.030 | 0.072 | 0.024 | 0.144 | 0.308 |
| 1 | 2 | 234244619 | 4663699 | 265 | TGCCAGAGTGWGGAAGAACAT | 0.210 | 0.107 | 0.049 | 0.044 | 0.047 | 0.180 | 0.035 | 0.055 | 0.044 | 0.048 | 0.074 | 0.210 |
| 1 | 2 | 234250148 | 6720619 | 266 | TCCATGTAATMGGTGTTGTAT | 0.287 | 0.053 | 0.038 | 0.251 | 0.088 | 0.261 | 0.039 | 0.032 | 0.267 | 0.081 | 0.139 | 0.273 |
| 1 | 2 | 234275046 | 4129945 | 267 | ACAGTCATCTRCCAGTGCGCC | 0.368 | 0.154 | 0.290 | 0.070 | 0.115 | 0.296 | 0.127 | 0.305 | 0.068 | 0.133 | 0.078 | 0.366 |
| 1 | 2 | 234287285 | 1115381 | 268 | CATGTGGAGCYGTGAGTATCT | — | — | — | — | — | — | — | — | — | — | — | — |
| 1 | 2 | 234300011 | 2741027 | 269 | TTAGTACCTGRTACAGATTCA | 0.064 | 0.371 | 0.236 | 0.126 | 0.032 | 0.075 | 0.377 | 0.229 | 0.142 | 0.025 | 0.059 | 0.084 |
| 1 | 2 | 234311122 | 1551265 | 270 | GATATAAAAAMGTATATATGA | — | — | — | — | — | — | — | — | — | — | — | — |
| 1 | 2 | 234318637 | 1377460 | 271 | GAGAGTATAARTGTTATATCA | 0.8090 | 0.407 | 0.191 | 0.035 | 0.222 | 0.790 | 0.393 | 0.199 | 0.044 | 0.230 | 0.454 | 0.809 |
| 1 | 2 | 234365062 | 2602379 | 272 | TCCATTAATTRTAGTAACAGG | — | — | — | — | — | — | — | — | — | — | — | — |
| 1 | 2 | 234378214 | 6754100 | 273 | AGAATTCAAGMCCATACATTC | 0.019 | 0.303 | 0.119 | 0.299 | 0.307 | 0.000 | 0.288 | 0.125 | 0.255 | 0.317 | 0.003 | 0.034 |
| 1 | 2 | 234388162 | 6715829 | 274 | TTTTTTTTTTWAAAAACTTTT | — | — | — | — | — | — | — | — | — | — | — | — |
| 1 | 2 | 234405117 | 4663945 | 275 | ATTGTAATAGRAGAATGTTTC | 0.334 | 0.045 | 0.452 | 0.383 | 0.256 | 0.270 | 0.028 | 0.478 | 0.406 | 0.248 | 0.477 | 0.334 |
| 1 | 2 | 234417467 | 4294999 | 276 | CCTCTATTCGRCCATTTAAAT | — | — | — | — | — | — | — | — | — | — | — | — |
| 1 | 2 | 234455242 | 11563252 | 277 | TCCAGATGAGYTTCAGTGTAA | — | — | — | — | — | — | — | — | — | — | — | — |

Results from the Crohn's Disease genome wide association study using the Quebec Founder Population (QFP) for 1 associated region.
Individual SNP markers genotyped in the genome wide scan are presented in each row of the table. The corresponding chromosome region ID is presented as identified in Tabel 1.
The chromosome number and coordinate of the SNP according to the NCBI genome assembly build 35 are indicated in columns 2 and 3.
The RS# column corresponds to the NCBI dbSNP identifier for the SNP. The Seq ID is the unique numerical identifier for this SNP in the sequence listing for this patent.
The column labeld Flanking Sequence corresponds to 21 bp of nucleotide sequence centerd at the SNP, which is coded using the standard degenerate naming system.
The remainder of the table lists-log 10 p values for association of the indicated haplotype centered at the corresponding SNP with the disease as described in the text, using LDSTATS V2, V4 and Single Type. Values for the association of single markers, as well as 3, 5, 7 and 9 marker haplotype windows are shown [see EXAMPLE 1 section for explanation of statistical calculations].

TABLE 3
List of associated haplotypes based on the Crohn Disease genome wide association study (GWAS)
using the Quebec Founder Population (QFP). Individual haplotypes with their relative risks (RR) are
presented in each row of the table: these data were extracted from the associated marker haplotype
window with the most significant p value for each SNP in Table 2. The first column lists the region ID
as presented in Table 1. The Haplotype column lists the specific nucleotides for the individual SNP
alleles contributing to the haplotype reported.
The Case and Control columns correspond to the numbers of case and control chromosomes, respectively,
containing the haplotype variant noted in the Haplotype column.
The Total Case and Total Control columns list the total numbers of case and control chromosomes for which
genotype data was available for the haplotype in question. The RR column corresponds to the odds ratio for
the haplotype.
The remainder of the columns lists the SeqIDs for the SNPs contributing to the haplotype and their relative
location with respect to the central marker.
The Central marker (0) column lists the SeqID for the central marker on which the haplotype is based.
Flaniding markers are identified by minus (−) or plus (+) signs to indicate the relative location of flanking SNPs.
See Table 2 for additional information on the central SNP of the haplotype.

| | | | | | | | Central | Central | Central | Central | Central | Central | Central | Central | Central |
|---|---|---|---|---|---|---|---|---|---|---|---|---|---|---|---|
| Region | | | Con- | Total | Total | | marker | marker | marker | marker | marker | marker | marker | marker | marker |
| ID | Haplotype | Case | trol | Case | Control | RR | (−4) | (−3) | (−2) | (−1) | (0) | (+1) | (+2) | (+3) | (+4) |
| 1 | CTTGGTA | 26 | 46 | 754 | 754 | 0.550 | | 223 | 224 | 226 | 228 | 231 | 233 | 234 | |
| 1 | CTTGGTG | 44 | 67 | 754 | 754 | 0.635 | | 223 | 224 | 226 | 228 | 231 | 233 | 234 | |
| 1 | GTTGACGTA | 3 | 11 | 754 | 754 | 0.270 | 223 | 224 | 226 | 228 | 231 | 233 | 234 | 237 | 240 |
| 1 | CTTGGTGCG | 33 | 58 | 754 | 754 | 0.549 | 223 | 224 | 226 | 228 | 231 | 233 | 234 | 237 | 240 |
| 1 | GTTGACATG | 31 | 14 | 754 | 754 | 2.266 | 223 | 224 | 226 | 228 | 231 | 233 | 234 | 237 | 240 |
| 1 | TTGGTGCGG | 54 | 78 | 752 | 752 | 0.669 | 224 | 226 | 228 | 231 | 233 | 234 | 237 | 240 | 241 |
| 1 | TGGTGCGGC | 43 | 65 | 752 | 752 | 0.641 | 226 | 228 | 231 | 233 | 234 | 237 | 240 | 241 | 242 |
| 1 | TGACATGGA | 22 | 9 | 752 | 752 | 2.488 | 226 | 228 | 231 | 233 | 234 | 237 | 240 | 241 | 242 |
| 1 | ACATGGA | 23 | 11 | 752 | 752 | 2.125 | | 231 | 233 | 234 | 237 | 240 | 241 | 242 | |
| 1 | ACGCGGA | 1 | 8 | 752 | 752 | 0.124 | | 231 | 233 | 234 | 237 | 240 | 241 | 242 | |
| 1 | GCGGCCA | 7 | 18 | 752 | 752 | 0.383 | | 234 | 237 | 240 | 241 | 242 | 245 | 247 | |
| 1 | CGACTAAGG | 20 | 8 | 752 | 752 | 2.541 | 237 | 240 | 241 | 242 | 245 | 247 | 249 | 250 | 252 |
| 1 | TGACTAAGA | 1 | 8 | 752 | 752 | 0.124 | 237 | 240 | 241 | 242 | 245 | 247 | 249 | 250 | 252 |
| 1 | GGCTAAGGC | 95 | 66 | 752 | 752 | 1.503 | 240 | 241 | 242 | 245 | 247 | 249 | 250 | 252 | 254 |
| 1 | TAAGG | 169 | 120 | 754 | 754 | 1.526 | | | 245 | 247 | 249 | 250 | 252 | | |
| 1 | CAAGA | 1 | 8 | 754 | 754 | 0.124 | | | 245 | 247 | 249 | 250 | 252 | | |
| 1 | CTAAGGCCG | 72 | 41 | 754 | 754 | 1.836 | 242 | 245 | 247 | 249 | 250 | 252 | 254 | 255 | 257 |
| 1 | TAAGGCCGA | 84 | 51 | 754 | 754 | 1.726 | 245 | 247 | 249 | 250 | 252 | 254 | 255 | 257 | 258 |
| 1 | AAGGCCGAT | 50 | 23 | 754 | 754 | 2.257 | 247 | 249 | 250 | 252 | 254 | 255 | 257 | 258 | 260 |
| 1 | GAGACCGAC | 2 | 11 | 754 | 754 | 0.180 | 247 | 249 | 250 | 252 | 254 | 255 | 257 | 258 | 260 |
| 1 | AAGCCCCTA | 4 | 13 | 754 | 754 | 0.304 | 249 | 250 | 252 | 254 | 255 | 257 | 258 | 260 | 262 |
| 1 | AGGCCGATG | 15 | 5 | 754 | 754 | 3.041 | 249 | 250 | 252 | 254 | 255 | 257 | 258 | 260 | 262 |
| 1 | GGCCGATGT | 20 | 5 | 754 | 754 | 4.082 | 250 | 252 | 254 | 255 | 257 | 258 | 260 | 262 | 264 |
| 1 | GCCGATGTA | 25 | 7 | 754 | 754 | 3.660 | 252 | 254 | 255 | 257 | 258 | 260 | 262 | 264 | 265 |
| 1 | CCGATGTAC | 31 | 14 | 754 | 754 | 2.266 | 254 | 255 | 257 | 258 | 260 | 262 | 264 | 265 | 266 |
| 1 | ACACTAAGA | 34 | 56 | 754 | 754 | 0.589 | 258 | 260 | 262 | 264 | 266 | 266 | 267 | 269 | 271 |
| 1 | ACTAAGAAG | 53 | 76 | 754 | 754 | 0.674 | 262 | 264 | 265 | 266 | 267 | 269 | 271 | 273 | 275 |

TABLE 4
List of candidate genes from the regions identified from the Genome Wide association analysis from
the QFP, derived from B35. The first column corresponds to the region identifier provided in Table 1.
The second and third columns correspond to the chromosome and cytogenetic band, respectively.
The fourth and fifth columns correspond to the chromosomal start and end coordinates of the NCBI
genome assembly derived from build 35 (B35, the start and end position relate to the + orientation
of the NCBI assembly and do not necessarily correspond to the orientation of the gene). The sixth and
seventh columns correspond to the official gene symbol and gene name, respectively,
and were obtained from the NCBI Entrez Gene database. The eighth column corresponds to the NCBI
Entrez Gene Identifier (GeneID). The ninth and tenth columns correspond to the Sequence IDs from
nucleotide (cDNA) and protein entries in the Sequence Listing.

| | Chro- | Cyto- | Start | | | | Entrez | Nucle- | |
|---|---|---|---|---|---|---|---|---|---|
| Region | mo- | genetic | Position | End position | Gene | Gene | Gene | otide | Protein |
| ID | some | Band | B35 | B35 | Symbol | Name | ID | Seq ID | Seq ID |
| 1 | 2 | 2q37.1 | 233387546 | 223548823 | TNRC15 | trinucleotide repeat containing 15 | 26058 | 1 | 2 |
| 1 | 2 | 2q37 | 233456679 | 233466780 | KCNJ13 | potassium inwardly-rectifying channel, subfamily J, | 3769 | 3 | 4 |
| | | | | | | member 13 | | | |
| 1 | 2 | 2q37.1 | 233560499 | 233566612 | UNQ830 | ASCL830 | 389084 | 5 | 6 |
| 1 | 2 | 2q37 | 233568920 | 233703443 | NGEF | neuronal guanine nucleotide exchange factor | 25791 | 7 | 8 |
| 1 | 2 | 2q37 | 233722887 | 233725272 | NEU2 | sialidase 2 (cytosolic sialidase) | 4759 | 9 | 10 |
| 1 | 2 | 2q36- | 233851676 | 233898543 | INPP5D | inositol polyphosphate-5-phosphatase, 145 kDa | 3635 | 11 | 12 |
| | | q37 | | | | | | | |
| 1 | 2 | 2q37.1 | 233942300 | 233985315 | ATG16L1 | ATG16 autophagy related 16-like 1 (S. cerevisiae) | 55054 | 13, 15, | 14, 16, |
| | | | | | | | | 17 | 18 |
| 1 | 2 | 2q37.1 | 233998493 | 234037701 | SAG | S-antigen; retina and pineal gland (arrestin) | 6295 | 19 | 20 |
| 1 | 2 | 2q37.1 | 234045153 | 234162743 | DGKD | diacylglycerol kinase, delta 130 kDa | 8527 | 21, 23 | 22, 24 |
| 1 | 2 | 2q37.1 | 234168038 | 234251869 | USP40 | ubiquitin specific peptidase 40 | 55230 | 25 | 26 |
| 1 | 2 | 2q37 | 234276085 | 234276937 | UGT1A12P | UDP glucuronosyltransferase 1 family, polypeptide | 54573 | — | — |
| | | | | | | A12 pseudogene | | | |
| 1 | 2 | 2q37 | 234294199 | 234295044 | UGT1A11P | UDP glucuronosyltransferase 1 family, polypeptide | 54574 | — | — |
| | | | | | | A11 pseudogene | | | |
| 1 | 2 | 2q37 | 234308291 | 234463945 | UGT1A8 | UDP glucuronosyltransferase 1 family, polypeptide | 54576 | 27 | 28 |
| | | | | | | A8 | | | |
| 1 | 2 | 2q37 | 234327123 | 234463951 | UGT1A10 | UDP glucuronosyltransferase 1 family, polypeptide | 54575 | 29 | 30 |
| | | | | | | A10 | | | |
| 1 | 2 | 2q37 | 234338575 | 234339672 | UGT1A13P | UDP glucuronosyltransferase 1 family, polypeptide | 404204 | — | — |
| | | | | | | A13 pseudogene | | | |
| 1 | 2 | 2q37 | 234362544 | 234463951 | UGT1A9 | UDP glucuronosyltransferase 1 family, polypeptide | 54600 | 31 | 32 |
| | | | | | | A9 | | | |
| 1 | 2 | 2q37 | 234372584 | 234463945 | UGT1A7 | UDP glucuronosyltransferase 1 family, polypeptide | 54577 | 33 | 34 |
| | | | | | | A7 | | | |
| 1 | 2 | 2q37 | 234382321 | 234463945 | UGT1A6 | UDP glucuronosyltransferase 1 family, polypeptide | 54578 | 35, 37 | 36, 38 |
| | | | | | | A6 | | | |
| 1 | 2 | 2q37 | 234403636 | 234463945 | UGT1A5 | UDP glucuronosyltransferase 1 family, polypeptide | 54579 | 39 | 40 |
| | | | | | | A5 | | | |
| 1 | 2 | 2q37 | 234409438 | 234463945 | UGT1A4 | UDP glucuronosyltransferase 1 family, polypeptide | 54657 | 41 | 42 |
| | | | | | | A4 | | | |
| 1 | 2 | 2q37 | 234419773 | 234463945 | UGT1A3 | UDP glucuronosyltransferase 1 family, polypeptide | 54659 | 43 | 44 |
| | | | | | | A3 | | | |
| 1 | 2 | 2q37 | 234437754 | 234439186 | UGT1A2P | UDP glucuronosyltransferase 1 family, polypeptide | 54580 | — | — |
| | | | | | | A2 pseudogene | | | |
| 1 | 2 | 2q37 | 234450919 | 234463945 | UGT1A1 | UDP glucuronosyltransferase 1 family, polypeptide | 54658 | 45 | 46 |
| | | | | | | A1 | | | |

TABLE 5
List of additional Crohn's disease candidate genes from the Genome Wide association analysis on
the QFP, derived from B36. In order to identify genes not placed in the regions from Table 1 according
to Build 35, the region coordinates were converted to Build 36 using the UCSC (University of California
Santa Cruz) online program LiftOver. Only new genes that were mapped to this version of the genome
asembly are included in this table. The first column corresponds to the region identifier provided in Table 1.
The second and third columns correspond to the chromosome and cytogenetic band, respectively. The
fourth and fifth columns correspond to the chromosomal start and end coordinates of the NCBI genome
assembly derived from build 36 (the start and end position relate to the + orientation of the NCBI
assembly and do not necessarily correspond to the orientation of the gene). The sixth and seventh columns
correspond to the official gene symbol and gene name, respectively, and were obtained from the NCBI
Entrez Gene database. The eighth column corresponds to the NCBI Entrez Gene Identifier (GeneID).
The ninth and tenth columns correspond to the Sequence IDs from nucleotide (cDNA) and protein entries
in the Sequence Listing.

| | | | Start | | | | | | |
|---|---|---|---|---|---|---|---|---|---|
| Region | | Cytogenetic | Position | End position | Gene | | Entrez | Nucleotide | Protein |
| ID | Chromosome | Band | B36 | B36 | Symbol | Gene Name | Gene ID | Seq ID | Seq ID |
| 1 | 2 | 2q37.1 | 233632820 | 233703606 | LOC653796 | similar to SH2 containing inositol | 653796 | 47 | 48 |
| | | | | | | phosphatase isoform b | | | |
| 1 | 2 | 2q37.1 | 233875714 | 233881802 | LOC642292 | hypothetical protein LOC642292 | 642292 | — | — |

TABLE 6
List of candidate genes based on EST clustering from the regions identified from the Genome
Wide association analysis on the QFP samples. The first column corresponds to the region
identifier provided in Table 1. The second column corresponds to the chromosome number.
The third and fourth columns correspond to the chromosomal start and end coordinates of the
NCBI genome assembly derived from build 35 (B35). The fifth column corresponds to the
ECGene identifier, corresponding to the ECGene track of UCSC. These ECGene entries
were determined by their overlap with the regions from Table 1, based on the start and end
coordinates of both Region and ECGene identifiers. The sixth and seventh columns correspond
to the Sequence IDs from nucleotide and protein entries in the Sequence Listing.

| | | Start Position | End Position | | Nucleotide | Protein |
|---|---|---|---|---|---|---|
| Region ID | Chromosome | Build35 | Build35 | Name | Seq ID | Seq ID |
| 1 | 2 | 233387530 | 233548841 | H2C23833.3 | 49 | 50 |
| 1 | 2 | 233387530 | 233550792 | H2C23833.4 | 51 | 52 |
| 1 | 2 | 233387544 | 233510194 | H2C23833.6 | 53 | 54 |
| 1 | 2 | 233387544 | 233548841 | H2C23833.7 | 66 | 56 |
| 1 | 2 | 233387545 | 233548841 | H2C23833.8 | 57 | 58 |
| 1 | 2 | 233387545 | 233550792 | H2C23833.9 | 59 | 60 |
| 1 | 2 | 233387552 | 233548841 | H2C23833.10 | 61 | 62 |
| 1 | 2 | 233387552 | 233550792 | H2C23833.11 | 63 | 64 |
| 1 | 2 | 233456565 | 233466780 | H2C23854.1 | 65 | 66 |
| 1 | 2 | 233456565 | 233466780 | H2C23854.2 | 67 | 68 |
| 1 | 2 | 233456679 | 233466780 | H2C23854.3 | 69 | 70 |
| 1 | 2 | 233456679 | 233466780 | H2C23854.4 | 71 | 72 |
| 1 | 2 | 233458355 | 233466780 | H2C23854.5 | 73 | 74 |
| 1 | 2 | 233500007 | 233548841 | H2C23833.18 | 75 | 76 |
| 1 | 2 | 233559846 | 233566616 | H2C23881.1 | 77 | 78 |
| 1 | 2 | 233565640 | 233566616 | H2C23881.2 | 79 | 80 |
| 1 | 2 | 233565994 | 233566621 | H2C23881.3 | 81 | 82 |
| 1 | 2 | 233565994 | 233568017 | H2C23881.4 | 83 | 84 |
| 1 | 2 | 233565994 | 233568923 | H2C23881.5 | 85 | 86 |
| 1 | 2 | 233566735 | 233568923 | H2C23833.19 | 87 | 88 |
| 1 | 2 | 233568900 | 233571840 | H2C23883.1 | 89 | 90 |
| 1 | 2 | 233568900 | 233581180 | H2C23883.2 | 91 | 92 |
| 1 | 2 | 233568900 | 233703448 | H2C23883.3 | 93 | 94 |
| 1 | 2 | 233660266 | 233665011 | H2C23883.4 | 85 | 96 |
| 1 | 2 | 233702828 | 233706098 | H2C23890.1 | 97 | 98 |
| 1 | 2 | 233702975 | 233706099 | H2C23890.2 | 99 | 100 |
| 1 | 2 | 233722886 | 233725272 | H2C23891.1 | 101 | 102 |
| 1 | 2 | 233750074 | 233898546 | H2C23892.1 | 103 | 104 |
| 1 | 2 | 233750074 | 233898867 | H2C23892.2 | 105 | 106 |
| 1 | 2 | 233763379 | 233769546 | H2C23895.1 | 107 | 108 |
| 1 | 2 | 233851680 | 233898867 | H2C23908.1 | 109 | 110 |
| 1 | 2 | 233894424 | 233896298 | H2C23926.1 | 111 | 112 |
| 1 | 2 | 233897478 | 233898548 | H2C23930.1 | 113 | 114 |
| 1 | 2 | 233942270 | 233986319 | H2C23935.1 | 119 | 120 |
| 1 | 2 | 233942270 | 233986319 | H2C23935.2 | 115 | 116 |
| 1 | 2 | 233942270 | 233986319 | H2C23935.3 | 117 | 118 |
| 1 | 2 | 233942270 | 233986319 | H2C23935.4 | 121 | 122 |
| 1 | 2 | 233942270 | 233986672 | H2C23935.5 | 125 | 126 |
| 1 | 2 | 233942270 | 233986672 | H2C23935.6 | 123 | 124 |
| 1 | 2 | 233942270 | 233986672 | H2C23935.7 | 127 | 128 |
| 1 | 2 | 233942299 | 233986319 | H2C23935.8 | 129 | 130 |
| 1 | 2 | 233942303 | 233974103 | H2C23935.9 | 131 | 132 |
| 1 | 2 | 233942317 | 233986312 | H2C23935.10 | 133 | 134 |
| 1 | 2 | 233964366 | 233986319 | H2C23835.11 | 135 | 136 |
| 1 | 2 | 233996169 | 233997039 | H2C23951.1 | 137 | 138 |
| 1 | 2 | 233998461 | 234037701 | H2C23953.1 | 139 | 140 |
| 1 | 2 | 233998481 | 234037701 | H2C23953.2 | 141 | 142 |
| 1 | 2 | 233998461 | 234037701 | H2C23953.3 | 143 | 144 |
| 1 | 2 | 233998461 | 234037701 | H2C23953.4 | 145 | 146 |
| 1 | 2 | 233998466 | 234009650 | H2C23953.5 | 147 | 148 |
| 1 | 2 | 233998485 | 234017978 | H2C23953.6 | 149 | 150 |
| 1 | 2 | 234018458 | 234036600 | H2C23953.7 | 151 | 152 |
| 1 | 2 | 234027657 | 234037701 | H2C2396.1 | 153 | 154 |
| 1 | 2 | 234028706 | 234037701 | H2C23953.8 | 155 | 156 |
| 1 | 2 | 234045152 | 234162746 | H2C23965.1 | 157 | 158 |
| 1 | 2 | 234045219 | 234083043 | H2C23965.2 | 159 | 160 |
| 1 | 2 | 234078799 | 234162746 | H2C23965.3 | 161 | 162 |
| 1 | 2 | 234089131 | 234096394 | H2C23973.1 | 163 | 164 |
| 1 | 2 | 234148884 | 234150513 | H2C23965.4 | 165 | 166 |
| 1 | 2 | 234154459 | 234157796 | H2C23965.5 | 167 | 168 |
| 1 | 2 | 234166164 | 234180286 | H2C23997.1 | 169 | 170 |
| 1 | 2 | 234166164 | 234251867 | H2C239973.2 | 171 | 172 |
| 1 | 2 | 234176254 | 234177022 | H2C23997.3 | 173 | 174 |
| 1 | 2 | 234183046 | 234203148 | H2C23997.4 | 175 | 176 |
| 1 | 2 | 234244970 | 234251867 | H2C23997.5 | 177 | 178 |
| 1 | 2 | 234251390 | 234251867 | H2C23997.6 | 179 | 180 |
| 1 | 2 | 234264392 | 234268480 | H2C240101.1 | 181 | 182 |
| 1 | 2 | 234308290 | 234463956 | H2C24012.1 | 183 | 184 |
| 1 | 2 | 234327099 | 234463956 | H2C24012.2 | 185 | 186 |
| 1 | 2 | 234327119 | 234460918 | H2C24012.3 | 187 | 188 |
| 1 | 2 | 234362498 | 234463956 | H2C24012.4 | 189 | 190 |
| 1 | 2 | 234372583 | 234463956 | H2C24012.5 | 191 | 192 |
| 1 | 2 | 234373013 | 234382992 | H2C24019.1 | 193 | 194 |
| 1 | 2 | 234382252 | 234460918 | H2C24012.6 | 195 | 196 |
| 1 | 2 | 234382252 | 234463956 | H2C24012.7 | 197 | 198 |
| 1 | 2 | 234382347 | 234447020 | H2C24012.8 | 199 | 200 |
| 1 | 2 | 234383511 | 234399340 | H2C24020.1 | 201 | 202 |
| 1 | 2 | 234383511 | 234463956 | H2C24012.9 | 203 | 204 |
| 1 | 2 | 234383532 | 234420610 | H2C24012.10 | 205 | 206 |
| 1 | 2 | 234383532 | 234460918 | H2C24012.11 | 207 | 208 |
| 1 | 2 | 234403637 | 234408719 | H2C24012.12 | 209 | 210 |
| 1 | 2 | 234403637 | 234463956 | H2C24012.13 | 211 | 212 |
| 1 | 2 | 234409423 | 234463956 | H2C24012.14 | 213 | 214 |
| 1 | 2 | 234419753 | 234463956 | H2C24012.15 | 215 | 216 |
| 1 | 2 | 234444951 | 234445915 | H2C24028.1 | 217 | 218 |
| 1 | 2 | 234444951 | 234445991 | H2C24026.2 | 219 | 220 |
| 1 | 2 | 234450891 | 234463956 | H2C24012.16 | 221 | 222 |

TABLE 7
Top 72 CD-associated SNPs, ranked with respect to the p-value obtained in an allele-based case-control comparison
(CCA) in panel A. Also included are the p-values for the genotype-based case-control comparison (CCG) and the TDT.
Nucleotide positions refer to NCBI build 34. Markers with p < 0.05 in either the case-control or the TDT analysis in
replication panel B are highlighted in bold italics. SNPs with a significant result in both panel B tests are additionally
marked by grey shading. In addition to rs2241880, only SNP rs1050152 (Leu503Phe) in the SLC22A4 gene, reported
earlier by Pettekova et al. and the known CARD15 SNP rs2066845 (“SNP12) yielded consistent replication.

| | | | Screening (panel A) | | | | | Replication (panel B) | | |
|---|---|---|---|---|---|---|---|---|---|---|
| # | Gene | Celera ID | dbSNP ID | chr. | position | P_{CCA} | P_{CCG} | P_{CCA} | P_{CCG} | P_{TDT} |
| 1 | DCP1B | hCV2194128 | rs12423058 | 12 | 1,934,927 | 5.8 * 10⁻¹⁴ | 3.6 * 10⁻¹³ | 0.92 | 0.54 | 0.07 |
| 2 | TINAG | hCV1202797 | rs1058768 | 6 | 54,232,983 | 1.7 * 10⁻¹² | 7.9 * 10⁻¹¹ | 0.27 | 0.15 | 0.21 |
| | | 2 | | | | | | | | |
| 3 | OR8H1 | hCV2577077 | rs17613241 | 11 | 55,839,523 | 2.2 * 10⁻⁰⁹ | 2.8 * 10⁻⁰⁹ | 0.27 | 0.41 | 0.15 |
| | | 5 | | | | | | | | |
| 4 | TTN | hCV2562648 | rs10497517 | 2 | 179,646,084 | 3.4 * 10⁻⁰⁷ | 2.7 * 10⁻⁰⁶ | 0.17 | 0.37 | 0.7 |
| | | 8 | | | | | | | | |
| 5 | OR10A4 | hCV1589535 | rs2595453 | 11 | 6,862,804 | 0.00005 | 0.0003 | 0.18 | 0.21 | 0.43 |
| | | 2 | | | | | | | | |
| 6 | hCG17440 | hCV3111449 | rs211716 | 1 | 75,529,932 | 0.0001 | 0.0006 | 0.05 | 0.16 | 0.14 |
| | 77 | | | | | | | | | |
| 7 | hCG17440 | hCV928121 | rs211715 | 1 | 75,530,066 | 0.0002 | 0.001 | 0.07 | 0.21 | 0.19 |
| | 77 | | | | | | | | | |
| [symbol] | [symbol] | [symbol] | [symbol] | [symbol] | [symbol] | [symbol] | [symbol] | [symbol] | [symbol] | [symbol] |
| 9 | IL7R | hCV2025977 | rs6897932 | 5 | 35,920,076 | 0.0004 | 0.0002 | 0.91 | 0.99 | 0.95 |
| [symbol] | [symbol] | [symbol] | [symbol] | [symbol] | [symbol] | [symbol] | [symbol] | [symbol] | [symbol] | [symbol] |
| 11 | FLJ23577 | hCV2577012 | — | 5 | 35,715,804 | 0.0004 | 0.004 | 0.21 | 0.41 | 0.81 |
| | | 3 | | | | | | | | |
| 12 | U2 | hCV2563797 | rs6730351 | 2 | 223,793,960 | 0.0007 | 0.003 | 0.55 | 0.81 | 0.5 |
| | | 5 | | | | | | | | |
| [symbol] | [symbol] | [symbol] | [symbol] | [symbol] | [symbol] | [symbol] | [symbol] | [symbol] | [symbol] | [symbol] |
| 14 | [symbol] | hCV1911085 | rs1165165 | 6 | 25,970,445 | 0.0009 | 0.004 | 0.58 | 0.26 | 0.9 |
| [symbol] | [symbol] | [symbol] | [symbol] | [symbol] | [symbol] | [symbol] | [symbol] | [symbol] | [symbol] | [symbol] |
| | [symbol] | [symbol] | [symbol] | | | | | | | |
| 16 | NALP13 | hCV2092168 | rs303997 | 19 | 61,116,255 | 0.001 | 0.005 | 0.73 | 0.86 | 0.82 |
| 17 | hCG18121 | hCV2599494 | rs10483261 | 14 | 20,346,679 | 0.001 | 0.005 | 0.79 | 0.76 | 0.08 |
| | 62 | 2 | | | | | | | | |
| 18 | hCG16464 | hCV1596554 | rs2291479 | 3 | 179,495,857 | 0.001 | 0.006 | 0.49 | 0.72 | 0.6 |
| | 71 | 5 | | | | | | | | |
| 19 | HS6ST3 | hCV3118872 | rs2282135 | 13 | 95,187,906 | 0.001 | 0.003 | 0.12 | 0.25 | 0.86 |
| [symbol] | [symbol] | [symbol] | [symbol] | [symbol] | [symbol] | [symbol] | [symbol] | [symbol] | [symbol] | [symbol] |
| 21 | VGF | hCV2564960 | — | 7 | 100,378,082 | 0.002 | 0.006 | 0.27 | 0.17 | 0.13 |
| | | 9 | | | | | | | | |
| [symbol] | [symbol] | [symbol] | [symbol] | [symbol] | [symbol] | [symbol] | [symbol] | [symbol] | [symbol] | [symbol] |
| 23 | PLSCR4 | hCV2564738 | rs3762685 | 3 | 147,259,528 | 0.002 | 0.005 | 0.71 | 0.77 | 0.3 |
| | | 3 | | | | | | | | |
| 24 | OR5U1 | hCV2519378 | rs9257694 | 6 | 29,382,496 | 0.002 | 0.008 | 0.52 | 0.77 | 1 |
| [symbol] | [symbol] | [symbol] | [symbol] | [symbol] | [symbol] | [symbol] | [symbol] | [symbol] | [symbol] | [symbol] |
| | | [symbol] | | | | | | | | |
| [symbol] | [symbol] | [symbol] | [symbol] | [symbol] | [symbol] | [symbol] | [symbol] | [symbol] | [symbol] | [symbol] |
| | | [symbol] | | | | | | | | |
| 27 | FUCA1 | hCV1202362 | rs11549094 | 1 | 23,650,437 | 0.002 | 0.008 | 0.48 | 0.54 | 0.69 |
| | | 9 | | | | | | | | |
| 28 | hCG19995 | hCV2481084 | rs3129096 | 6 | 29,291,365 | 0.002 | 0.008 | 0.45 | 0.67 | 0.83 |
| | 32 | | | | | | | | | |
| 29 | OR2J2 | hCV1119478 | rs3116817 | 6 | 29,257,553 | 0.002 | 0.01 | 0.57 | 0.84 | 0.61 |
| | | 3 | | | | | | | | |
| 30 | FLJ25660 | hCV2537241 | rs541169 | 19 | 40,410,860 | 0.003 | 0.01 | 0.77 | 0.39 | 0.32 |
| 31 | KUB3 | hCV2577032 | rs3751325 | 12 | 56,621,893 | 0.003 | 0.001 | 0.46 | 0.75 | 0.25 |
| | | 0 | | | | | | | | |
| 32 | SLC16A4 | hCV1596127 | rs2271885 | 1 | 110,220,442 | 0.003 | 0.01 | 0.31 | 0.09 | 0.1 |
| | | 5 | | | | | | | | |
| [symbol] | [symbol] | [symbol] | [symbol] | [symbol] | [symbol] | [symbol] | [symbol] | [symbol] | [symbol] | [symbol] |
| [symbol] | [symbol] | [symbol] | [symbol] | [symbol] | [symbol] | [symbol] | [symbol] | [symbol] | [symbol] | [symbol] |
| [symbol] | [symbol] | [symbol] | [symbol] | [symbol] | [symbol] | [symbol] | [symbol] | [symbol] | [symbol] | [symbol] |
| | | [symbol] | | | | | | | | |
| 36 | DHX34 | hCV1150706 | rs12984558 | 19 | 52,548,176 | 0.003 | 0.01 | 0.82 | 0.87 | 0.36 |
| | | 4 | | | | | | | | |
| 37 | hCG26636 | hCV2942610 | rs1864147 | 16 | 64,719,751 | 0.003 | 0.01 | 0.06 | 0.16 | 0.29 |
| 38 | DP58 | hCV622249 | rs32857 | 5 | 79,939,445 | 0.003 | 0.0008 | 0.93 | 0.36 | 0.15 |
| 39 | PLSCR4 | hCV9539784 | rs1061409 | 3 | 147,238,670 | 0.003 | 0.01 | 0.93 | 0.99 | 0.29 |
| [symbol] | [symbol] | [symbol] | [symbol] | [symbol] | [symbol] | [symbol] | [symbol] | [symbol] | [symbol] | [symbol] |
| | [symbol] | | | | | | | | | |
| 41 | ST5 | hCV1506057 | rs3812762 | 11 | 8,715,949 | 0.003 | 0.008 | 0.71 | 0.54 | 0.87 |
| 42 | OAS2 | hCV8920052 | rs15895 | 12 | 111,860,241 | 0.004 | 0.01 | 0.6 | 0.74 | 0.91 |
| 43 | FLJ46906 | hCV8275411 | rs1129180 | 6 | 138,998,702 | 0.004 | 0.006 | 0.72 | 0.91 | 0.51 |
| 44 | C14orf125 | hCV8601135 | rs7157977 | 14 | 29,848,248 | 0.004 | 0.02 | 0.29 | 0.35 | 0.96 |
| [symbol] | [symbol] | [symbol] | [symbol] | [symbol] | [symbol] | [symbol] | [symbol] | [symbol] | [symbol] | [symbol] |
| 46 | CACNA1E | hCV1432822 | rs704326 | 1 | 178,999,038 | 0.004 | 0.01 | 0.32 | 0.61 | 0.17 |
| 47 | KNSL7 | hCV2592411 | rs3804583 | 3 | 44,845,239 | 0.004 | 0.01 | 0.22 | 0.38 | 1 |
| | | 1 | | | | | | | | |
| [symbol] | [symbol] | [symbol] | [symbol] | [symbol] | [symbol] | [symbol] | [symbol] | [symbol] | [symbol] | [symbol] |
| | | [symbol] | | | | | | | | |
| 49 | SLC1A4 | hCV2681351 | rs759458 | 2 | 65,219,899 | 0.004 | 0.02 | 0.81 | 0.82 | 0.25 |
| 50 | U15 | hCV3215915 | rs4774310 | 15 | 56,701,220 | 0.005 | 0.02 | 0.23 | 0.45 | 0.33 |
| 51 | MYO10 | hCV3132500 | rs27431 | 5 | 16,723,356 | 0.005 | 0.01 | 0.7 | 0.83 | 0.55 |
| 52 | IFI44L | hCV1187369 | rs3820093 | 1 | 78,518,119 | 0.005 | 0.007 | 0.35 | 0.63 | 0.92 |
| | | 4 | | | | | | | | |
| 53 | CAPSL | hCV8811801 | rs1445898 | 5 | 35,956,030 | 0.005 | 0.01 | 0.35 | 0.53 | 0.75 |
| 54 | FLJ31846 | hCV2595981 | rs3764147 | 13 | 42,255,925 | 0.005 | 0.009 | 0.05 | 0.11 | 0.77 |
| | | 1 | | | | | | | | |
| 55 | hCG17947 | hCV37420 | rs13092702 | 3 | 147,440,204 | 0.005 | 0.02 | 0.28 | 0.43 | 0.79 |
| | 90 | | | | | | | | | |
| [symbol] | [symbol] | [symbol] | [symbol] | [symbol] | [symbol] | [symbol] | [symbol] | [symbol] | [symbol] | [symbol] |
| | | [symbol] | | | | | | | | |
| 57 | NUDCD1 | hCV1588332 | rs2980618 | 8 | 110,258,581 | 0.006 | 0.02 | 0.29 | 0.56 | 0.33 |
| | | 9 | | | | | | | | |
| 58 | UBAP2 | hCV8778477 | rs1785506 | 9 | 34,007,106 | 0.006 | 0.02 | 0.1 | 0.21 | 0.96 |
| [symbol] | [symbol] | [symbol] | [symbol] | [symbol] | [symbol] | [symbol] | [symbol] | [symbol] | [symbol] | [symbol] |
| 60 | LRRK2 | hCV3215842 | rs3761863 | 12 | 39,044,919 | 0.007 | 0.02 | 0.6 | 0.8 | 0.06 |
| [symbol] | [symbol] | [symbol] | — | [symbol] | [symbol] | [symbol] | [symbol] | [symbol] | [symbol] | [symbol] |
| | | [symbol] | | | | | | | | |
| 62 | hCG19941 | hCV2441812 | rs2157650 | 8 | 17,715,645 | 0.007 | 0.0004 | 0.11 | 0.24 | 0.13 |
| | 24 | | | | | | | | | |
| 63 | hCG20402 | hCV2598877 | rs10427252 | 2 | 215,765,119 | 0.007 | 0.02 | 0.09 | 0.14 | 0.9 |
| | 72 | 3 | | | | | | | | |
| [symbol] | [symbol] | [symbol] | — | [symbol] | [symbol] | [symbol] | [symbol] | [symbol] | [symbol] | [symbol] |
| | | [symbol] | | | | | | | | |
| 65 | C14orf8 | hCV2434490 | rs9624 | 14 | 19,490,249 | 0.008 | 0.01 | 0.35 | 0.64 | 0.21 |
| 66 | U10 | hCV1201713 | rs1826619 | 10 | 31,005,500 | 0.008 | 0.02 | 0.21 | 0.41 | 0.37 |
| | | 5 | | | | | | | | |
| 67 | FLJ23577 | hCV2574280 | rs7710284 | 5 | 35,738,276 | 0.008 | 0.03 | 0.8 | 0.53 | 0.42 |
| | | 5 | | | | | | | | |
| 68 | NALP8 | hCV8110157 | rs306481 | 19 | 61,179,415 | 0.008 | 0.04 | 0.97 | 0.93 | 0.96 |
| 69 | U1 | hCV2708023 | rs4534436 | 1 | 119,108,148 | 0.008 | 0.02 | 0.21 | 0.16 | 0.31 |
| | | 0 | | | | | | | | |
| 70 | IGHMBP2 | hCV2547453 | rs17612126 | 11 | 68,481,034 | 0.009 | 0.01 | 0.98 | 0.92 | 0.27 |
| | | 0 | | | | | | | | |
| 71 | USP16 | hCV2870492 | rs2274802 | 21 | 29,330,540 | 0.009 | 0.04 | 0.52 | 0.18 | 0.11 |
| 72 | CLEC2D | hCV2599256 | rs3764022 | 12 | 9,724,791 | 0.009 | 0.007 | 0.82 | 0.8 | 0.14 |
| | | 9 | | | | | | | | |

TABLE 8
Fine mapping of the CD association signal at the ATG16L1 locus. The p
values obtained in panel B in allele-based (CCA) and genotype-based
(CCG) association analyses of the tagging and coding SNPs are shown.
The only coding SNP in ATG16L1 (rs2241880) is highlighted in bold
italics. MAF: minor allele frequency.

| SNP ID | Position (build 35 | MAF | p_{CCG} | p_{CCA} | p_{TDT} |
|---|---|---|---|---|---|
| rs6757418 | 233,909,321 | 0.16 | 0.56 | 0.95 | 0.42 |
| rs11674242 | 233,916,795 | 0.12 | 0.47 | 0.23 | 0.88 |
| rs2341565 | 233,917,138 | 0.15 | 0.57 | 0.29 | 0.58 |
| rs12471808 | 233,920,324 | 0.46 | 0.68 | 0.81 | 0.46 |
| rs12472651 | 233,920,522 | 0.41 | 0.67 | 0.36 | 0.03 |
| rs10211468 | 233,921,467 | 0.43 | 0.24 | 0.8 | 0.13 |
| rs11675235 | 233,922,554 | 0.13 | 0.69 | 0.43 | 0.76 |
| rs4663340 | 233,924,691 | 0.08 | 0.02 | 0.004 | 0.25 |
| rs7563345 | 233,925,244 | 0.34 | 0.04 | 0.02 | 0.002 |
| rs2083575 | 233,927,080 | 0.07 | 0.07 | 0.03 | 0.04 |
| rs13412102 | 233,927,971 | 0.41 | 0.004 | 0.001 | 0.006 |
| rs12471449 | 233,928,958 | 0.14 | 0.0005 | 0.0001 | 0.02 |
| rs11685932 | 233,948,322 | 0.33 | 0.11 | 0.04 | 0.008 |
| rs6431660 | 233,949,234 | 0.47 | 0.0001 | 0.00002 | 0.0001 |
| rs1441090 | 233,950,042 | 0.07 | 0.002 | 0.001 | 0.13 |
| rs13011156 | 233,953,812 | 0.05 | 0.77 | 0.61 | 0.83 |
| rs12105443 | 233,961,028 | 0.01 | 0.63 | 0.63 | 0.74 |
| rs3792110 | 233,962,638 | 0.28 | 0.23 | 0.09 | 0.006 |
| rs2289476 | 233,963,556 | 0.06 | 0.88 | 0.64 | 0.8 |
| rs2289472 | 233,964,240 | 0.47 | 0.00007 | 0.00001 | 0.00002 |
| [symbol] | [symbol] | [symbol] | [symbol] | [symbol] | [symbol] |
| rs2241879 | 233,965,468 | 0.47 | 0.0001 | 0.00002 | 0.00003 |
| rs7600743 | 233,971,359 | 0.06 | 0.21 | 0.16 | 0.61 |
| rs3792106 | 233,972,740 | 0.41 | 0.0003 | 0.00008 | 0.00005 |
| rs4663396 | 233,974,251 | 0.2 | 0.0006 | 0.0001 | 0.02 |
| rs7587051 | 233,976,755 | 0.34 | 0.09 | 0.04 | 0.008 |
| rs6748547 | 233,984,766 | 0.05 | 0.69 | 0.73 | 1 |
| rs6759896 | 233,992,972 | 0.41 | 0.06 | 0.02 | 0.007 |

TABLE 9
Results of a haplotype analysis of 9 SNPs at the ATG16L1 locus. SNPs included in the haplotype
analysis are marked by asterisks in FIG. 2, thereby showing their block assignment. All analyses were
carried out using either COCAPHASE or TDTPHASE. Non-synonymous SNP rs2241880 is highlighted in
bold and the risk allele underlined. Obviously, the sole risk haplotype (ACACAGGCG) is fully signified by
rs2241880 allele G; all other haplotypes are protective and carry allele A. This haplotype pattern strongly
suggests that rs2241880 is indeed the major risk variant at the ATG16L1 locus.

| | | | | p-value | | | | p-value |
|---|---|---|---|---|---|---|---|---|
| Haplotype | f_{cases} | f_{controls} | OR_{case-control} | COCAPHASE | f_{transmitted} | f_{non-transmitted} | OR_{TDT} | TDTPHASE |
| ACACAGGCG | 0.603 | 0.532 | 1.34 | 0.00002 | 0.535 | 0.285 | 2.87 | 0.0001 |
| ACGCTAACG | 0.254 | 0.283 | 0.86 | 0.0502 | 0.262 | 0.396 | 0.54 | 0.0164 |
| AGATAAATG | 0.047 | 0.069 | 0.67 | 0.0045 | 0.077 | 0.092 | 0.82 | 0.5462 |
| GGACAAATG | 0.052 | 0.069 | 0.74 | 0.042 | 0.081 | 0.139 | 0.55 | 0.0608 |
| ACGCAAGTA | 0.044 | 0.048 | 0.91 | 0.5685 | 0.035 | 0.073 | 0.46 | 0.0728 |
| ACACAAGTG | <0.01 | <0.01 | n.d. | n.d. | 0.012 | 0.015 | 0.8 | 0.705 |

TABLE 10
Analysis of the statistical interaction between
ATG16L1 SNP rs2241880 and CARD15 genotype, coded as
described in the Example section.

| affection | | CARD15 | | |
|---|---|---|---|---|
| status | ATG16L1 | dd | dD | DD |
| control | GG | 219 | 62 | 2 |
| | AG | 435 | 87 | 2 |
| | AA | 185 | 35 | 5 |
| CD | GG | 175 | 92 | 42 |
| | AG | 232 | 136 | 57 |
| | AA | 73 | 50 | 21 |
| odds ratio | GG | 2.03 | 1.04 | 5.00 |
| (95% CI) | | (1.43-2.88) | (0.59-1.84) | (0.76-41.05) |
| | AG | 1.35 | 1.09 | 6.79 |
| | | (0.98-1.87) | (0.64-1.88) | (1.04-55.16) |
| | AA | 1 | 1 | 1 |

1. A method of determining susceptibility to Crohn's disease in a subject, comprising determining the presence or absence of at least one SNP in a biological sample from said subject, wherein said SNP is listed in Table 7 and wherein the presence of said at least one SNP indicates susceptibility to Crohn's Disease.

2. The method of claim 1, wherein said at least one SNP is in a ATG16L1 gene.

3. The method of claim 2, wherein said at least one SNP in the ATG16L1 gene is rs2241880.

4. The method of claim 1, wherein the presence or absence of at least one further SNP in a CARD15 gene is determined.

5. (canceled)

6. The method of claim 1, wherein the at least one SNP is listed in Table 8.

7.-11. (canceled)

12. The method of claim 1, wherein said subject has symptoms of an inflammatory bowel disease

13. The method of claim 12, wherein said symptoms are selected from the group consisting of diarrhea, abdominal pain, fever, fatigue, rectal bleeding, weight loss, and combinations thereof.

14. (canceled)

15. The method of claim 1, wherein the presence or absence of the at least one SNP is determined with an assay selected from the group consisting of electrophoretic analysis, restriction length polymorphism analysis, sequence analysis and hybridization analysis

16.-22. (canceled)

23. A method of genetic mapping for detecting the association of at least one marker for Crohn's disease comprising a) obtaining a biological samples from a group of patients, b) screening for the presence or absence of an allele of at least one SNP or a group of SNPs from Table 7 within each biological sample, and c) evaluating whether said at least one SNP or a group of SNPs shows a statistically significant skewed genotype distribution between the group of patients compared to a group of controls.

24. The method of claim 23, wherein said biological sample is selected from the group consisting of hair, fluid, serum, tissue swab, buccal swab, saliva, mucus, urine, stools, spermatozoids, vaginal secretions, lymph, amniotic fluid, pleural liquid and tear.

25. The method of claim 23, wherein said groups of patients and controls are from a human population.

26. The method of claim 23, wherein said groups of patients and controls are recruited independently according to a specific phenotypic criteria.

27. The method of claim 23, wherein said screening is performed by an assay selected from the group consisting of allele-specific hybridization, oligonucleotide ligation, allele-specific elongation/ligation, allele-specific amplification, single-base extension, molecular inversion probe, invasive cleavage, selective termination, restriction length polymorphism, sequencing, SSCP, mismatch-cleaving, and denaturing gradient gel electrophoresis.

28. The method of claim 23, wherein said screening is carried out on each individual of a cohort at each of at least one SNP or a group of SNPs from Table 7.

29. (canceled)

30. The method of claim 23, wherein the genotype distribution is compared one SNP at a time.

31. The method of claim 23, wherein the genotype distribution is compared with a group of markers from Table 7 forming a haplotype.

32. The method of claim 23, wherein the genotype distribution is compared using the allelic frequencies between the group of patients and controls.

33.-47. (canceled)

48. A method for inducing a Crohn's disease-like state in a tissue or cell, comprising contacting the tissue or cell with at least one gene listed in Table 7 to induces a Crohn Disease-like state in said tissue or cell.

49. The method of claim 48, wherein said cell is selected from the group consisting of smooth muscle cell, neutrophil, T cell, mast cell, Crohn's disease CD4+ lymphocyte, monocyte, macrophage, dendritic cell, synovial cell, glial cell, villous intestinal cell, neutrophilic granulocyte, eosinophilic granulocyte, keratinocyte, lamina propria lymphocyte, intraepithelial lymphocyte and epithelial cell.

50. A method for screening drug candidates for treating Crohn's disease, comprising: a) contacting a cell induced by the method of claim 48 with a drug candidate for treating Crohn's disease; and b) assaying for a pro-inflammatory like state, such that an absence of the pro-inflammatory like state is indicative of the drug candidate being effective in treating Crohn's disease.

51.-54. (canceled)

55. A drug screening assay comprising a) administering a test compound to an animal having Crohn's disease or a cell composition isolated therefrom, and b) comparing the level of gene expression of a gene listed in Table 7 in the presence of the test compound with one or both of the levels of said gene expression in the absence of the test compound or in normal cells, wherein test compounds which cause the level of expression of a gene listed in Table 7 to approach normal are candidates for drugs to treat Crohn's disease.

56.-60. (canceled)

61. A method of diagnosing susceptibility to Crohn's disease in an individual, comprising screening for an at-risk haplotype of at least one SNP from Table 7, that is more frequently present in an individual susceptible to Crohn's disease compared to a control individual, wherein the presence of the at-risk haplotype increases risk of Crohn s disease in said individual.

62. The method of claim 61, wherein the risk increase is at least about 20%.

63.-64. (canceled)

65. The method of claim 62, wherein said screening comprises enzymatic amplification of nucleic acid from said individual or amplification using universal oligos on elongation/ligation products.

66. The method of claim 65, wherein the nucleic acid is DNA.

67. The method of claim 66, wherein the DNA is human DNA.

68. The method of claim 62, wherein said screening comprises a) obtaining material containing nucleic acid from the individual (b) amplifying said nucleic acid, and c) determining the presence or absence of an at-risk haplotype in said amplified nucleic acid.

69. The method of claim 68, wherein determining the presence of an at-risk haplotype is performed by an assay selected from the group consisting of electrophoretic analysis, restriction length polymorphism analysis, sequence analysis, and hybridization analysis.

70.-74. (canceled)

75. A method of diagnosing a susceptibility to Crohn's disease in an individual, comprising detecting an alteration in the expression or composition of a polypeptide encoded by a gene listed in Table 7 a sample from said individual, in comparison with the expression or composition of a polypeptide encoded by said gene in a control sample, wherein the presence of an alteration in expression or the composition of the polypeptide in the sample from said individual is indicative of a susceptibility to Crohn's disease.

76. The method of claim 75, wherein the alteration in the expression or composition of a polypeptide encoded by said gene comprises expression of a splicing variant polypeptide in a test sample that differs from a splicing variant polypeptide expressed in a control sample.

77.-138. (canceled)

139. A method for predicting the efficacy of a drug for treating Crohn's disease in a human patient, comprising a) obtaining a sample of cells from the patient, b) obtaining a set of genotypes from the sample, wherein the set of genotypes comprises genotypes of one or more polymorphic loci from Table 7, and c) comparing the set of genotypes of the sample with a set of genotypes associated with efficacy of the drug, wherein similarity between the set of genotypes of the sample and the set of genotypes associated with efficacy of the drug predicts the efficacy of the drug for treating Crohn's disease in the patient.

140. The method of claim 139, wherein the sample of cells is derived from a tissue selected from the group consisting of the scalp, GI track, muscle, sebaceous gland nerve, blood, dermis, epidermis and other skin cells, cutaneous surfaces, intertrigious areas, genitalia, vessels and endothelium.

141. The method of claim 140, wherein the cells are selected from the group consisting of melanocytes, hair follicle cells, muscle cells, nerve cells, keratinocytes, monocytes, neutrophils, langerhans cells, Crohn's disease CD4+, Crohn's disease CD8+ T cells and lymphocytes.

142. The method of claim 139, wherein the sample is obtained via biopsy.

143. The method of claim 139, wherein the set of genotypes from the sample comprises genotypes of at least two of the polymorphic loci listed in Table 7.

144. The method of claim 139, wherein the set of genotypes from the sample is obtained by hybridization to allele-specific oligonucleotides complementary to the polymorphic loci from Table 7, wherein said allele-specific oligonucleotides are contained on a microarray.

145. The method of claim 144, wherein the oligonucleotides comprise nucleic acid molecules at least 95% identical to SEQ ID from Table 7.

146. The method of claim 144, wherein the set of genotypes from the sample is obtained by sequencing said polymorphic loci in said sample.

147. The method of claim 144, wherein the drug is selected from the group consisting of symptom relievers and drugs for Crohn's disease.

148.-158. (canceled)

159. A method of assessing a patient's risk of having or developing Crohn's disease, said method comprising a) determining a genotype for at least one polymorphic locus from Table 7 in said patient; b) comparing said genotype of a) to a genotype for at least one polymorphic locus from Table 7 that is associated with Crohn's disease; and c) assessing the patient's risk of having or developing Crohn's disease, wherein said patient has a higher risk of having or developing Crohn's disease with respect to a control individual if the genotype for at least one polymorphic locus from Table 7 in said patient is the same as said genotype for at least one polymorphic locus from Table 7 that is associated with Crohn's disease.

160. The method of claim 4, wherein the at least one SNP in the CARD15 gene is rs2066845.

161. The method of claim 1, wherein the presence or absence of at least one SNP in the SLC22A4 gene is determined.

162. The method of claim 161, wherein said at least one SNP in the SLC22A4 gene is rs1050152.

The application's sequence listing, which the Patent Office published only in electronic form, follows.

SEQUENCE LISTING (277 sequences)

SEQ ID NO: 1 - DNA, 5959 bp, Homosapiens
atcttgtgttgttgaggctgaggactgactggggttctgagactccctgtcccggaccgcagattatagtgggaccagtctcattaggttgaatctacagcctatgttggtgttaacccaggtctcttagagcgttaaaaggatctgaacaaagtctgctcaaatctcctgctgtgaaccagcagaatttttgaacagagaccacgtctccacctcctgggctccaacgattctcccatcttggcctcccaaagcgctggatttacaggtttcttcacatataaaaatctattgtaaaaatacggaaaagaatggcagcggaaacgcagacactgaactttgggcctgaatggctccgagctctgtccagtggtgggagtattacatcccctcctctttctccagcattgccgaagtataaattagcagattatcgttacggcagagaagaaatgttagcacttttccttaaagacaacaagataccttcagaccttctggataaagaatttctgcctatcctccaggaggaaccccttccaccattggctctggtaccctttacagaagaagaacagagaaacttttccatgtctgtaaatagtgctgctgtcctgcgattgacaggacgaggaggaggaggaacagtggtgggggctcctagaggtcgaagttcttcaagagggcgaggcagaggcagaggtgaatgtggtttctaccaaagaagttttgatgaagtagagggtgtttttggtcgaggaggtggcagagaaatgcatagatcgcagagctgggaggaaaggggtgacagacgttttgaaaaaccaggacgaaaagatgtagggagaccaaattttgaggaaggtggaccaacatcagtagggagaaagcatgaatttatacgctcagaaagtgaaaattggcgcatctttagagaggaacaaaatggagaagatgaagatggaggttggcgactagctggatcaaggagggatggagagaggtggcgacctcacagtcctgatggccctcgttctgcaggctggcgggaacacatggaacgacgtcggaggtttgagtttgattttcgagatagagatgatgaacggggttaccgaagggttcgctctggcagtgggagcatagatgatgacagggatagcttgcccgaatggtgcttagaggatgctgaagaagaaatgggtacatttgactcatctggagcattcctttctctaaaaaaagtacagaaagagcctattccagaagagcaggagatggacttccggcctgtggacgaaggggaggagtgctctgactctgagggtagccataatgaagaggccaaagaacccgataagacaaataagaaagaaggagagaaaacagatagagtaggagttgaagctagtgaggaaactccccagacctcatcatcatctgctagaccaggtactccttcagaccatcagtctcaggaagcatcacagtttgagaggaaagatgaaccaaaaactgagcaaacggaaaaagctgaagaggagactcggatggaaaatagtctaccagccaaagtgcccagcagaggggatgaaatggttgctgatgtccagcagcccctgtcgcagattccttcagatacagcctctcctcttctcatacttccacctcctgttcccaatcctagtcctactctccggccagttgaaacaccagttgtaggtgctcctggtatgggcagtgtttccacagaacctgatgatgaagaaggtctcaaacatttggagcagcaagctgagaaaatggtggcttatctccaagacagtgcactagatgatgaaagattggcatcaaaactgcaagagcacagagctaaaggagtgtcgattccattgatgcatgaagcaatgcagaagtggtattacaaagatcctcagggagaaattcaaggtcccttcaataatcaggagatggcagaatggtttcaggcgggctattttactatgtctttattggtgaagagagcgtgtgatgaaagcttccaacctcttggcgatatcatgaaaatgtggggaagggttcccttttctccaggtccagctccccctcctcatatgggagagctggaccaggaacgactgaccaggcagcaagaactcacagccttataccagatgcagcacctgcagtaccagcagtttttaatacaacaacaatatgcacaggttttggcccaacagcagaaagcagcactgtcttcccagcagcagcagcagttggcacttcttcttcaacagtttcagaccttgaagatgagaatatctgatcagaacatcattccctcagtaactaggtctgtgtccgtgccagatactggctctatctgggagcttcagccaacagcttcacagcctacagtttgggaaggtggtagtgtatgggatcttcctctggacaccacgacaccaggccctgccctggaacagcttcagcagctagagaaggccaaagctgcaaagctagagcaagagagaagagaggcagaaatgagggcaaaacgggaagaggaagagcgaaagaggcaggaagaactccgaagacaacaggaggaaattcttcggcgacagcaggaagaagaaaggaaaaggcgagaggaagaagaacttgcccgaaggaaacaggaagaggctctgcgtcgccagcgggagcaagaaattgcattaaggcgacagcgagaagaggaagaaagacagcagcaagaagaagctcttagaagactggaagagaggagaagagaagaggaagaaaggcggaagcaggaagaattgttacgcaaacaggaagaggaggctgcaaaatgggcccgggaagaagaagaagcccagcgtcgattagaggagaaccggctgcggatggaagaggaggcagccagactccggcatgaggaagaagaacggaagagaaaggagctggaggtccagcggcagaaggagttaatgcgccagaggcaacagcagcaagaggctctccggaggttgcagcagcagcagcagcaacaacagctggcgcagatgaagcttccttcttcttcaacgtggggccagcagtccaatacaacagcatgtcagtcccaggccacgctgtcgttggctgaaatccaaaaactagaggaagaacgagaacggcagcttcgagaagagcaaaggcgccagcagagggagttgatgaaagctcttcagcagcagcagcaacagcaacagcagaaactctcaggttgggggaatgtcagcaaaccttcaggtaccacgaaatctcttctggagatccagcaggaagaggccaggcaaatgcaaaagcagcagcagcagcagcagcaacaccagcaaccaaacagagctcgtaacaatacgcattccaacctgcacaccagcattgggaattctgtttggggctctataaatactggtcctcctaaccagtgggcatctgacctagtcagtagtatttggagtaatgctgacactaaaaactccaacatgggattctgggatgatgcagtgaaagaggtgggacctaggaattcaacaaataaaaataaaaacaacgccagtctcagtaaatctgtaggtgtgtctaaccggcagaataagaaagtagaagaagaagaaaagttgctgaagctctttcagggagtaaataaagcccaagatggatttacgcagtggtgtgaacagatgcttcatgcccttaatacggcaaataacttggatgttcccacatttgtttctttcctgaaagaagtagaatctccttatgaggtccatgattatatcagggcctatttaggagatacttctgaggccaaggagtttgccaagcagttccttgagcgccgtgccaaacagaaagccaaccagcagcgtcagcagcagcagctgccacagcagcagcagcagcagccgccacagcagccgccacagcagccacaacagcaggactctgtgtgggggatgaaccacagtacactccattcagtatttcagaccaatcaaagcaacaaccaacaatccaattttgaggctgtgcagagtggcaagaagaagaaaaagcagaagatggtccgagcagatcccagtttattaggattttcagtcaatgcatcatcggagcgactcaacatgggtgaaatcgagacgttggatgactactgagcacctgccagtggactggccatccctctcctgtctgccgactatggagtctccacctttggacacaacacttactcaccatttactctttatcactctgcaacaaatcacagaaccgatcatctcaggctttttcttctggccctttgtgtccaagattctttaatccatttttgttggtgaacatctcagactatagataagtggactggaccctgtgtcttgggggtggcagttgggattactccccaacaaggctgattttaggcagcatgtgttcactgtgctgtgatttcatctactgtctcccagaaagtgtgttgggatcggccattagcagcttgctttctcttgtcactttttttcttctattttgttttttcttcttctttttccccccatcagggcaaatggtctaactggtgcaatcatgaagagagttaatggttaacagacattggccaataacaaaacaccccatggactgtgactcgagtatccaacaggcagtcagagctctcccggtctgaaagttgcattgccactgctaactttgggattgcatcagagaggccctgagtggggttgagatgaggttggtttggtttgatgttacacactcctcacctgttctttctgagtgtcctttctctgaaaggatttatgtttttcttcgttagatagtgacttctgagcaagctgatctcccctggcatgctccaacctgattggacaaaggaagctctatggcctgggagagagactattcttaatttttctttcttacaaaaactgatttttcccataaatatttttacttcagaggactaggaccattttgttttgggcccttctgctgaaaatttgtctcgtttaagaggcagctagaatctttaccatatgtatgaatttgtataatttcatttttggatagggataaacttttgcttctgataaaagcctggaatttcatctggtcctcagagcattgcgtgtgtgtcttgctgtagcccggaaaaggttttgtgtaaagattctgggatggcaagttgtttgccttttctgaaaagagaacatacagaacctgtccatctttaagaccttcatccatggaatctactatacaggaggatgcagtgggctggaggggatgggcgaaaatgggagcaggaagcctggcctggcttctggtcatggcctcctaaaaccttaaacttcaagtagaaatgtactcaagccctatttataaacaaatacttttcctgcctccaccaaacccctacagaacatcacctggaattgccactcacactgggttggagtcattgggcagctgtgcctgtgcgagaggtgctgtggtctgggcagcccctggaaaagcacctttgctgcctgtcattgttgcctgaagaaggctggagttgctctgagagcagtttgggtttggagtattatatttggcttctatttttattattttggatcaccattctccctatcccttcttgcctccctcccttctaaacatgtgtaataactatacagagactgctacaaaattgtatatagtttttggatcaaatagcatgaggggagaggaaaccattaaaagttggggctcctactctcctttgctttgtaaattcaaaagttgggggtgggtaagagggatagttaaaatgtttacaaaactttaggctccctcggaacttttgccagtgtggaggaaaataaaaaagaacttaaat

SEQ ID NO: 2 - protein, 1299 aa, Homosapiens
MAAETQTLNFGPEWLRALSSGGSITSPPLSPALPKYKLADYRYGREEMLALFLKDNKIPSDLLDKEFLPILQEEPLPPLALVPFTEEEQRNFSMSVNSAAVLRLTGRGGGGTVVGAPRGRSSSRGRGRGRGECGFYQRSFDEVEGVFGRGGGREMHRSQSWEERGDRRFEKPGRKDVGRPNFEEGGPTSVGRKHEFIRSESENWRIFREEQNGEDEDGGWRLAGSRRDGERWRPHSPDGPRSAGWREHMERRRRFEFDFRDRDDERGYRRVRSGSGSIDDDRDSLPEWCLEDAEEEMGTFDSSGAFLSLKKVQKEPIPEEQEMDFRPVDEGEECSDSEGSHNEEAKEPDKTNKKEGEKTDRVGVEASEETPQTSSSSARPGTPSDHQSQEASQFERKDEPKTEQTEKAEEETRMENSLPAKVPSRGDEMVADVQQPLSQIPSDTASPLLILPPPVPNPSPTLRPVETPVVGAPGMGSVSTEPDDEEGLKHLEQQAEKMVAYLQDSALDDERLASKLQEHRAKGVSIPLMHEAMQKWYYKDPQGEIQGPFNNQEMAEWFQAGYFTMSLLVKRACDESFQPLGDIMKMWGRVPFSPGPAPPPHMGELDQERLTRQQELTALYQMQHLQYQQFLIQQQYAQVLAQQQKAALSSQQQQQLALLLQQFQTLKMRISDQNIIPSVTRSVSVPDTGSIWELQPTASQPTVWEGGSVWDLPLDTTTPGPALEQLQQLEKAKAAKLEQERREAEMRAKREEEERKRQEELRRQQEEILRRQQEEERKRREEEELARRKQEEALRRQREQEIALRRQREEEERQQQEEALRRLEERRREEEERRKQEELLRKQEEEAAKWAREEEEAQRRLEENRLRMEEEAARLRHEEEERKRKELEVQRQKELMRQRQQQQEALRRLQQQQQQQQLAQMKLPSSSTWGQQSNTTACQSQATLSLAEIQKLEEERERQLREEQRRQQRELMKALQQQQQQQQQKLSGWGNVSKPSGTTKSLLEIQQEEARQMQKQQQQQQQHQQPNRARNNTHSNLHTSIGNSVWGSINTGPPNQWASDLVSSIWSNADTKNSNMGFWDDAVKEVGPRNSTNKNKNNASLSKSVGVSNRQNKKVEEEEKLLKLFQGVNKAQDGFTQWCEQMLHALNTANNLDVPTFVSFLKEVESPYEVHDYIRAYLGDTSEAKEFAKQFLERRAKQKANQQRQQQQLPQQQQQQPPQQPPQQPQQQDSVWGMNHSTLHSVFQTNQSNNQQSNFEAVQSGKKKKKQKMVRADPSLLGFSVNASSERLNMGEIETLDDY

SEQ ID NO: 3 - DNA, 2981 bp, Homosapiens
agtctaagaagagaacctacaaactagacttgtagattaaaattatctgatcaaaaaggcagactctgtaaatttccttaagacctaccttggcataaaggctgacccagcaaaagaactgagaaatacagcctgagatggacagcagtaattgcaaagttattgctcctctcctaagtcaaagataccggaggatggtcaccaaggatggccacagcacacttcaaatggatggcgctcaaagaggtcttgcatatcttcgagatgcttggggaatcctaatggacatgcgctggcgttggatgatgttggtcttttctgcttcttttgttgtccactggcttgtctttgcagtgctctggtatgttctggctgagatgaatggtgatctggaactagatcatgatgccccacctgaaaaccacactatctgtgtcaagtatatcaccagtttcacagctgcattctccttctccctggagacacaactcacaattggttatggtaccatgttccccagtggtgactgtccaagtgcaatcgccttacttgccatacaaatgctcctaggcctcatgctagaggcttttatcacaggtgcttttgtggcgaagattgcccggccaaaaaatcgagctttttcaattcgctttactgacatagcagtagtagctcacatggatggcaaacctaatcttatcttccaagtggccaacacccgacctagccctctaaccagtgtccgggtctcagctgtactctatcaggaaagagaaaatggcaaactctaccagaccagtgtggatttccaccttgatggcatcagttctgacgaatgtccattcttcatctttccactaacgtactatcactccattacaccatcaagtcctctggctactctgctccagcatgaaaatccttctcactttgaattagttgtattcctttcagcaatgcaggagggcactggagaaatatgccaaaggaggacatcctacctacagtctgaaatcatgttacatcactgttttgcatctctgttgacccgaggttccaaatgtgaatatcaaatcaagatggagaattttgacaagactgtccctgaatttccaactcctctggtttctaaaagcccaaacaggactgacctggatatccacatcaatggacaaagcattgacaattttcagatctctgaaacaggactgacagaataagacttatccattttttaatgtattaaatacacccagccagttatgcagctactttttctttactgtatctcatgttttcttttttcaatgctaattatagctctctacatcacggtaatcatgcctatgcctacgtaagaatggctgagctaacaatacacattctggaaacataacactctacattacaaagtttgttacctgctgaaatcaatgtaactcaacttgacagacacttatacagaaatgttgctggtgaatttataagaatgtggtatgatactagtaatgaaggcaaaatggacagtgaagtttaacacaactgaactctaagaaaatcaaccattaatctctcattttcatctgcaaattgaagcaacagtttagtttcaaacctagctccctgggtggaatgacgacttcactatacttagtgaatatcctttaagagctgggatttttttcaagacaacaaagatcattcatttggttctttatactatgaaacttgagtaagtattacctccttaatttttaacaactaagaacaaaaattaacgagaaaaacaacaaagtacagatttatacataaacctaaaagcatttgaacatgacaccagaacacatacatatatgttcacttatttgtggcagaaggtgatcagataagctccagcccaaatggaacctgtggggtggtattttgcattgcaaggagacgcaaaattttattttaaaactgtcctccataataatcaaacggtgattcatctaaatgacttctagcaacctaagtaaagacattcccctcctatgtatgattcatttgatcatataaaacatcatgatggctctaattcataaatacaaaaatatatttaagtctttatagatataaagctttacttagatataacttgagtgagtagggaaaaaaatctacagtagataaagcaaaagataattaggcaacaaagcattttcaaactcaaattcctgtttccaacttcaaatagttttttctataaacacaaaatcagtgtttattcaccagtaggaggttggactagatgaactctattatttctttctaaatctaatagtctataaaaattatgtttcctctgttttttattttatctatgctaaaatgagccctttcccttatgtccagtttaagatgatcatttgcatgattttcatttcaataaaaaaaagagaaactgtccttaaaacaaaacaaaaaccaaaaaagtcaccctatcaggtttcaaacagatttgtggctgttcttttctgaaatttcccttattcaggtttctgtgggaaaaatgaaagattaaccttccccactggtgatgacctaggcaggaatcatctcttgaaataaatactagctgagtaaaggcaagcaggtgtgaagagcagggctcagcagcaagtcacatttttctactatttgaccaaaaggaaaagaaaataaagaagaactctggagtggtctaagactgataatagcagaagaatatcaagaacacagaaacttaattattgtgaacttttgctgtttgaaaatcttagacattcattcttaagtagaaatcagaccaacagattttcccaacccaagactattgtaacacataaagacagcaagaattcttatttctataataaattaacaagattcacctaacctttgaaaataaagtagtattgaagacttaaaaaaaaaaaaaaaaaaaataaaaaaaaaaaaaa

SEQ ID NO: 4 - protein, 360 aa, Homosapiens
MDSSNCKVIAPLLSQRYRRMVTKDGHSTLQMDGAQRGLAYLRDAWGILMDMRWRWMMLVFSASFVVHWLVFAVLWYVLAEMNGDLELDHDAPPENHTICVKYITSFTAAFSFSLETQLTIGYGTMFPSGDCPSAIALLAIQMLLGLMLEAFITGAFVAKIARPKNRAFSIRFTDIAVVAHMDGKPNLIFQVANTRPSPLTSVRVSAVLYQERENGKLYQTSVDFHLDGISSDECPFFIFPLTYYHSITPSSPLATLLQHENPSHFELVVFLSAMQEGTGEICQRRTSYLQSEIMLHHCFASLLTRGSKCEYQIKMENFDKTVPEFPTPLVSKSPNRTDLDIHINGQSIDNFQISETGLTE

SEQ ID NO: 5 - DNA, 480 bp, Homosapiens
gttaaccagcgcagtcctccgtgcgtcccgcccgccgctgccctcactcccggccaggatggcatcctgtctggccctgcgcatggcgctgctgctggtctccggggttctggcccctgcggtgctcacagacgatgttccacaggagcccgtgcccacgctgtggaacgagccggccgagctgccgtcgggagaaggccccgtggagagcaccagccccggccgggagcccgtggacaccggtcccccagcccccaccgtcgcgccaggacccgaggacagcaccgcgcaggagcggctggaccagggcggcgggtcgctggggcccggcgctatcgcggccatcgtgatcgccgccctgctggccacctgcgtggtgctggcgctcgtggtcgtcgcgctgagaaagttttctgcctcctgaagcgaataaaggggccgcgcccggccgcggcgcgactcggcaaaaaaaaaaaaaaa

SEQ ID NO: 6 - protein, 121 aa, Homosapiens
MASCLALRMALLLVSGVLAPAVLTDDVPQEPVPTLWNEPAELPSGEGPVESTSPGREPVDTGPPAPTVAPGPEDSTAQERLDQGGGSLGPGAIAAIVIAALLATCVVLALVVVALRKFSAS

SEQ ID NO: 7 - DNA, 3177 bp, Homosapiens
caggacgaagtttttggctgtgggctctctgggacagagtggagcgcctgtggatttagccggggacacaccatcctgctcgcaggtgcctggacaggacaggggacgagggaggaacactctctgaggaagcccaactcctatgagctcctctctggcagcactcaaaccagtgaagcttgggaaagtcattgacctccagtcgttctgctgagaaacatctggctctatttccatggagaccagggaatctgaagatttggaaaagacccggaggaaatcagcaagtgatcaatggaacactgataatgaaccagccaaggtgaaacctgagttactcccagaaaaagaggagacttctcaagctgaccaggatatccaagacaaagagcctcattgccacatcccaattaagagaaattccatcttcaatcgctccataagacgcaaaagcaaagccaaggccagagacaaccccgaacggaacgccagctgcctggcagattcacaggacaatggaaaatctgtaaatgagcccctgaccttgaatatcccctggagcagaacgcctccttgcagaacagcaatgcagacagacccaggagcccaggaaatgagtgagtcgtcctccaccccgggaaatggggccacgcccgaggagtggccggccctggccgacagccccaccacgctcaccgaggccctgcggatgatccaccccattcccgccgactcctggagaaacctcattgaacaaatagggctcctgtatcaggaataccgagataaatcgactctccaagaaatcgaaaccaggaggcaacaggatgcagaaatagaagacaataccaatgggtccccggccagtgaggacaccccggaggaggaagaagaagaggaggaggaggaggagccggccagcccaccagagaggaagactctgccccagatctgcctgctcagtaacccccactcaaggttcaacctctggcaggatcttcccgagatccggagcagcggggtgcttgagatcctacagcctgaggagattaagctgcaggaggccatgttcgagctggtcacttccgaggcgtcctactacaagagtctgaacctgctcgtgtcccacttcatggagaacgagcggataaggaagatcctgcacccgtccgaggcgcacatcctcttctccaacgtcctggacgtgctggctgtcagtgagcggttcctcctggagctggagcaccggatggaggagaacatcgtcatctctgacgtgtgtgacatcgtgtaccgttatgcggctgaccacttctctgtctacatcacctacgtcagcaatcagacctaccaggagcggacctataagcagctgctccaggagaaggcagctttccgggagctgatcgcgcagctagagctcgaccccaagtgcagggggctgcccttctcctccttcctcatcctgcctttccagaggatcacacgcctcaagctgttggtccagaacatcctgaagagggtagaagagaggtctgagcgggagtgcactgctttggatgctcacaaggagctggaaatggtggtgaaggcatgcaacgagggcgtcaggaaaatgagccgcacggaacagatgatcagcattcagaagaagatggagttcaagatcaagtcggtgcccatcatctcccactcccgctggctgctgaagcagggtgagctgcagcagatgtcaggccccaagacctcccggaccctgaggaccaagaagctcttccacgaaatttacctcttcctgttcaacgacctgctggtgatctgccggcagattccaggagacaagtaccaggtatttgactcagctccgcggggactgctgcgtgtggaggagctggaggaccagggccagacgctggccaacgtgttcatcctgcggctgctggagaacgcagatgaccgggaggccacctacatgctaaaggcgtcctctcagagtgagatgaagcgttggatgacctcactggcccccaacaggaggaccaagtttgtttcgttcacatcccggctgctggactgcccccaggtccagtgcgtgcacccatacgtggctcagcagccagacgagctgacgctggagctcgccgacatcctcaacatcctggacaagactgacgacgggtggatctttggcgagcgtctgcacgaccaggagagaggctggttccccagctccatgactgaggagatcttgaatcccaagatccggtcccagaacctcaaggaatgtttccgtgtccacaagatggatgaccctcagcgcagccagaacaaggaccgcaggaagctgggcagccggaatcggcaatgacccccacccagggggccagcgggagcagggcctgcatgagaccccgacagaaggtggggggggggcctctgggaagcacaggccagcacctccccaggtggcaggatctggcttggggtgcccggccctcatccctgcccacgcagtgagtgctcatgtgtcttggccccttgcttgcaaactggataaagggtgcccaagcctctcctgatgcatttgtaaacaagaaggtttcagcagtattacaccacctccctcatgcctccgagggggtggaagggggtgggcacactccagggccccccatgcccctggcccccagggactggaagaggctcccaacccagagtgtccctgtgggaggcaggcagaaggtgacaattgacacgatttcctgcacgcgtcctcctctaccttggaagcagttagaatctaccaggcacagatgaggccgcccttgcctgacggagcttgatgagcagcccttggtctccggttccaggactgagagcccagctgcctctgcccacccttccccaggcctctgccagcctctggctgcacggtcaggccctgccccatggcaggcctgccagagcttggctggggacccctcccgcctctggctccctgatgggctggatgtaacttgtgtcttctagccgcttaaggagcccaggtgttttaaggaatgaattggtcactgcatcttgtatcgattatggttctgagaaaagcaaatatcacttttggctgcattaaaagaagcatcatatataaaataaaaaaaaaaaaaaaaaaaaaaaaaa

SEQ ID NO: 8 - protein, 710 aa, Homosapiens
METRESEDLEKTRRKSASDQWNTDNEPAKVKPELLPEKEETSQADQDIQDKEPHCHIPIKRNSIFNRSIRRKSKAKARDNPERNASCLADSQDNGKSVNEPLTLNIPWSRTPPCRTAMQTDPGAQEMSESSSTPGNGATPEEWPALADSPTTLTEALRMIHPIPADSWRNLIEQIGLLYQEYRDKSTLQEIETRRQQDAEIEDNTNGSPASEDTPEEEEEEEEEEEPASPPERKTLPQICLLSNPHSRFNLWQDLPEIRSSGVLEILQPEEIKLQEAMFELVTSEASYYKSLNLLVSHFMENERIRKILHPSEAHILFSNVLDVLAVSERFLLELEHRMEENIVISDVCDIVYRYAADHFSVYITYVSNQTYQERTYKQLLQEKAAFRELIAQLELDPKCRGLPFSSFLILPFQRITRLKLLVQNILKRVEERSERECTALDAHKELEMVVKACNEGVRKMSRTEQMISIQKKMEFKIKSVPIISHSRWLLKQGELQQMSGPKTSRTLRTKKLFHEIYLFLFNDLLVICRQIPGDKYQVFDSAPRGLLRVEELEDQGQTLANVFILRLLENADDREATYMLKASSQSEMKRWMTSLAPNRRTKFVSFTSRLLDCPQVQCVHPYVAQQPDELTLELADILNILDKTDDGWIFGERLHDQERGWFPSSMTEEILNPKIRSQNLKECFRVHKMDDPQRSQNKDRRKLGSRNRQ

SEQ ID NO: 9 - DNA, 1143 bp, Homosapiens
atggcgtcccttcctgtcctgcagaaggagagcgtgttccagtcgggagcccatgcctacagaatccctgccctgctctacctgcctgggcagcagtccctgctggccttcgcggaacagcgggcaagcaagaaggatgagcacgcagagctgattgtcctgcgcagaggagactacgacgcacccacccaccaggttcagtggcaagctcaggaggtggtggcccaggcccggctggatggccaccggtccatgaacccatgccccttgtatgacgcgcagacggggaccctcttcctcttcttcattgccatccctgggcaagtcacggagcaacagcagctgcagaccagggccaatgtgacgcggctgtgccaagtcaccagcactgaccacgggaggacctggagctcccccagagacctcactgatgcggccatcggcccagcctaccgggagtggtccacctttgcagtgggcccggggcattgtttgcagcttaacgacagggcccggagcctggtggtgcccgcctacgcctaccggaaacttcaccccatccaaaggccgatcccctctgccttctgcttcctcagccatgaccatgggcgcacgtgggcgcgagggcactttgtggcccaggacaccctggagtgccaggtggccgaagtcgagactggggagcagagggtggtgaccctcaacgcgagaagccacctccgagccagggtccaggcccagagcaccaatgacgggcttgatttccaggagtctcagctggtgaagaagctggtggagccgccgccccagggctgccaggggagcgtcatcagcttccccagcccccgctcggggcctggctccccagcccagtggctgctctacactcaccccacacactcctggcagagggccgacctgggtgcctacctcaacccgcgacctccagcccctgaggcctggtcagagccggtactgctggccaagggcagctgtgcctactcagacctccagagcatgggcaccggccctgatgggtcccccttgtttgggtgtctgtacgaagccaatgattacgaggagattgtctttctcatgttcaccctgaagcaagccttcccagctgagtacctgcctcagtga

SEQ ID NO: 10 - protein, 380 aa, Homosapiens
MASLPVLQKESVFQSGAHAYRIPALLYLPGQQSLLAFAEQRASKKDEHAELIVLRRGDYDAPTHQVQWQAQEVVAQARLDGHRSMNPCPLYDAQTGTLFLFFIAIPGQVTEQQQLQTRANVTRLCQVTSTDHGRTWSSPRDLTDAAIGPAYREWSTFAVGPGHCLQLNDRARSLVVPAYAYRKLHPIQRPIPSAFCFLSHDHGRTWARGHFVAQDTLECQVAEVETGEQRVVTLNARSHLRARVQAQSTNDGLDFQESQLVKKLVEPPPQGCQGSVISFPSPRSGPGSPAQWLLYTHPTHSWQRADLGAYLNPRPPAPEAWSEPVLLAKGSCAYSDLQSMGTGPDGSPLFGCLYEANDYEEIVFLMFTLKQAFPAEYLPQ

SEQ ID NO: 11 - DNA, 4928 bp, Homosapiens
aaacaggaagtcagtcagttaagctggtggcagcagccgaggccaccaagaggcaacgggcggcaggttgcagtggaggggcctccgctcccctcggtggtgtgtgggtcctgggggtgcctgccggcccggccgaggaggcccacgcccaccatggtcccctgctggaaccatggcaacatcacccgctccaaggcggaggagctgctttccaggacaggcaaggacgggagcttcctcgtgcgtgccagcgagtccatctcccgggcatacgcgctctgcgtgctgtatcggaattgcgtttacacttacagaattctgcccaatgaagatgataaattcactgttcaggcatccgaaggcgtctccatgaggttcttcaccaagctggaccagctcatcgagttttacaagaaggaaaacatggggctggtgacccatctgcaataccctgtgccgctggaggaagaggacacaggcgacgaccctgaggaggacacagtagaaagtgtcgtgtctccacccgagctgcccccaagaaacatcccgctgactgccagctcctgtgaggccaaggaggttcctttttcaaacgagaatccccgagcgaccgagaccagccggccgagcctctccgagacattgttccagcgactgcaaagcatggacaccagtgggcttccagaagagcatcttaaggccatccaagattatttaagcactcagctcgcccaggactctgaatttgtgaagacagggtccagcagtcttcctcacctgaagaaactgaccacactgctctgcaaggagctctatggagaagtcatccggaccctcccatccctggagtctctgcagaggttatttgaccagcagctctccccgggcctccgtccacgtcctcaggttcctggtgaggccaatcccatcaacatggtgtccaagctcagccaactgacaagcctgttgtcatccattgaagacaaggtcaaggccttgctgcacgagggtcctgagtctccgcaccggccctcccttatccctccagtcacctttgaggtgaaggcagagtctctggggattcctcagaaaatgcagctcaaagtcgacgttgagtctgggaaactgatcattaagaagtccaaggatggttctgaggacaagttctacagccacaagaaaatcctgcagctcattaagtcacagaaatttctgaataagttggtgatcttggtggaaacagagaaggagaagatcctgcggaaggaatatgtttttgctgactccaaaaagagagaaggcttctgccagctcctgcagcagatgaagaacaagcactcagagcagccggagcccgacatgatcaccatcttcatcggcacctggaacatgggtaacgccccccctcccaagaagatcacgtcctggtttctctccaaggggcagggaaagacgcgggacgactctgcggactacatcccccatgacatttacgtgatcggcacccaagaggaccccctgagtgagaaggagtggctggagatcctcaaacactccctgcaagaaatcaccagtgtgacttttaaaacagtcgccatccacacgctctggaacatccgcatcgtggtgctggccaagcctgagcacgagaaccggatcagccacatctgtactgacaacgtgaagacaggcattgcaaacacactggggaacaagggagccgtgggggtgtcgttcatgttcaatggaacctccttagggttcgtcaacagccacttgacttcaggaagtgaaaagaaactcaggcgaaaccaaaactatatgaacattctccggttcctggccctgggcgacaagaagctgagtccctttaacatcactcaccgcttcacgcacctcttctggtttggggatcttaactaccgtgtggatctgcctacctgggaggcagaaaccatcatccagaaaatcaagcagcagcagtacgcagacctcctgtcccacgaccagctgctcacagagaggagggagcagaaggtcttcctacacttcgaggaggaagaaatcacgtttgccccaacctaccgttttgagagactgactcgggacaaatacgcctacaccaagcagaaagcgacagggatgaagtacaacttgccttcctggtgtgaccgagtcctctggaagtcttatcccctggtgcacgtggtgtgtcagtcttatggcagtaccagcgacatcatgacgagtgaccacagccctgtctttgccacatttgaggcaggagtcacttcccagtttgtctccaagaacggtcccgggactgttgacagccaaggacagattgagtttctcaggtgctatgccacattgaagaccaagtcccagaccaaattctacctggagttccactcgagctgcttggagagttttgtcaagagtcaggaaggagaaaatgaagaaggaagtgagggggagctggtggtgaagtttggtgagactcttccaaagctgaagcccattatctctgaccctgagtacctgctagaccagcacatcctcatcagcatcaagtcctctgacagcgacgaatcctatggcgagggctgcattgcccttcggttagaggccacagaaacgcagctgcccatctacacgcctctcacccaccatggggagttgacaggccacttccagggggagatcaagctgcagacctctcagggcaagacgagggagaagctctatgactttgtgaagacggagcgtgatgaatccagtgggccaaagaccctgaagagcctcaccagccacgaccccatgaagcagtgggaagtcactagcagggcccctccgtgcagtggctccagcatcactgaaatcatcaaccccaactacatgggagtggggccctttgggccaccaatgcccctgcacgtgaagcagaccttgtcccctgaccagcagcccacagcctggagctacgaccagccgcccaaggactccccgctggggccctgcaggggagaaagtcctccgacacctcccggccagccgcccatatcacccaagaagtttttaccctcaacagcaaaccggggtctccctcccaggacacaggagtcaaggcccagtgacctggggaagaacgcaggggacacgctgcctcaggaggacctgccgctgacgaagcccgagatgtttgagaaccccctgtatgggtccctgagttccttccctaagcctgctcccaggaaggaccaggaatcccccaaaatgccgcggaaggaacccccgccctgcccggaacccggcatcttgtcgcccagcatcgtgctcaccaaagcccaggaggctgatcgcggcgaggggcccggcaagcaggtgcccgcgccccggctgcgctccttcacgtgctcatcctctgccgagggcagggcggccggcggggacaagagccaagggaagcccaagaccccggtcagctcccaggccccggtgccggccaagaggcccatcaagccttccagatcggaaatcaaccagcagaccccgcccaccccgacgccgcggccgccgctgccagtcaagagcccggcggtgctgcacctccagcactccaagggccgcgactaccgcgacaacaccgagctcccgcatcacggcaagcaccggccggaggaggggccaccagggcctctaggcaggactgccatgcagtgaagccctcagtgagctgccactgagtcgggagcccagaggaacggcgtgaagccactggaccctctcccgggacctcctgctggctcctcctgcccagcttcctatgcaaggctttgtgttttcaggaaagggcctagcttctgtgtggcccacagagttcactgcctgtgagacttagcaccaagtgctgaggctggaagaaaaacgcacaccagacgggcaacaaacagtctgggtccccagctcgctcttggtacttgggaccccagtgcctcgttgagggcgccattctgaagaaaggaactgcagcgccgatttgagggtggagatatagataataataatattaataataataatggccacatggatcgaacactcatgatgtgccaagtgctgtgctaagtgctttacgaacattcgtcatatcaggatgacctcgagagctgaggctctagccacctaaaaccacgtgcccaaacccaccagtttaaaacggtgtgtgttcggaggggtgaaagcattaagaagcccagtgccctcctggagtgagacaagggctcggccttaaggagctgaagagtctgggtagcttgtttagggtacaagaagcctgttctgtccagcttcagtgacacaagctgctttagctaaagtcccgcgggttccggcatggctaggctgagagcagggatctacctggcttctcagttctttggttggaaggagcaggaaatcagctcctattctccagtggagagatctggcctcagcttgggctagagatgccaaggcctgtgccaggttccctgtgccctcctcgaggtgggcagccatcaccagccacagttaagccaagccccccaacatgtattccatcgtgctggtagaagagtctttgctgttgctcccgaaagccgtgctctccagcctggctgccagggagggtgggcctcttggttccaggctcttgaaatagtgcagccttttcttcctatctctgtggctttcagctctgcttccttggttattaggagaatagatgggtgatgtctttccttatgttgctttttcaacatagcagaattaatgtagggagctaaatccagtggtgtgtgtgaatgcagaagggaatgcaccccacattcccatgatggaagtctgcgtaaccaataaattgtgcctttctcactcaaaaaaaaaaa

SEQ ID NO: 12 - protein, 1189 aa, Homosapiens
MVPCWNHGNITRSKAEELLSRTGKDGSFLVRASESISRAYALCVLYRNCVYTYRILPNEDDKFTVQASEGVSMRFFTKLDQLIEFYKKENMGLVTHLQYPVPLEEEDTGDDPEEDTVESVVSPPELPPRNIPLTASSCEAKEVPFSNENPRATETSRPSLSETLFQRLQSMDTSGLPEEHLKAIQDYLSTQLAQDSEFVKTGSSSLPHLKKLTTLLCKELYGEVIRTLPSLESLQRLFDQQLSPGLRPRPQVPGEANPINMVSKLSQLTSLLSSIEDKVKALLHEGPESPHRPSLIPPVTFEVKAESLGIPQKMQLKVDVESGKLIIKKSKDGSEDKFYSHKKILQLIKSQKFLNKLVILVETEKEKILRKEYVFADSKKREGFCQLLQQMKNKHSEQPEPDMITIFIGTWNMGNAPPPKKITSWFLSKGQGKTRDDSADYIPHDIYVIGTQEDPLSEKEWLEILKHSLQEITSVTFKTVAIHTLWNIRIVVLAKPEHENRISHICTDNVKTGIANTLGNKGAVGVSFMFNGTSLGFVNSHLTSGSEKKLRRNQNYMNILRFLALGDKKLSPFNITHRFTHLFWFGDLNYRVDLPTWEAETIIQKIKQQQYADLLSHDQLLTERREQKVFLHFEEEEITFAPTYRFERLTRDKYAYTKQKATGMKYNLPSWCDRVLWKSYPLVHVVCQSYGSTSDIMTSDHSPVFATFEAGVTSQFVSKNGPGTVDSQGQIEFLRCYATLKTKSQTKFYLEFHSSCLESFVKSQEGENEEGSEGELVVKFGETLPKLKPIISDPEYLLDQHILISIKSSDSDESYGEGCIALRLEATETQLPIYTPLTHHGELTGHFQGEIKLQTSQGKTREKLYDFVKTERDESSGPKTLKSLTSHDPMKQWEVTSRAPPCSGSSITEIINPNYMGVGPFGPPMPLHVKQTLSPDQQPTAWSYDQPPKDSPLGPCRGESPPTPPGQPPISPKKFLPSTANRGLPPRTQESRPSDLGKNAGDTLPQEDLPLTKPEMFENPLYGSLSSFPKPAPRKDQESPKMPRKEPPPCPEPGILSPSIVLTKAQEADRGEGPGKQVPAPRLRSFTCSSSAEGRAAGGDKSQGKPKTPVSSQAPVPAKRPIKPSRSEINQQTPPTPTPRPPLPVKSPAVLHLQHSKGRDYRDNTELPHHGKHRPEEGPPGPLGRTAMQ

SEQ ID NO: 13 - DNA, 3276 bp, Homosapiens
atttccggcatgagccggaagaccgtcccggatggcctcggggactgccagtgtgtggaggtgagctccgggattgccggcattcccgcttctgctggttgcttcatgctgcaggctgcggccgtcagccctcgctcgcattggtggcgctgaggtgccggggcagcaagtgacatgtcgtcgggcctccgcgccgctgacttcccccgctggaagcgccacatctcggagcaactgaggcgccgggaccggctgcagagacaggcgttcgaggagatcatcctgcaataacaaattgctggaaaagtcagatcttcattcagtgttggcccagaaactacaggctgaaaagcatgacgtaccaaacaggcacgagataagtcccggacatgatggcacatggaatgacaatcagctacaagaaatggcccaactgaggattaagcaccaagaggaactgactgaattacacaagaaacgtggggagttagctcaactggtgattgacctgaataaccaaatgcagcggaaggacagggagatgcagatgaatgaagcaaaaattgcagaatgtttgcagactatctctgacctggagacggagtgcctagacctgcgcactaagctttgtgaccttgaaagagccaaccagaccctgaaggatgaatatgatgccctgcagatcacttttactgccttggagggaaaactgaggaaaactacggaagagaaccaggagctggtcaccagatggatggctgagaaagcccaggaagccaatcggcttaatgcagagaatgaaaaagactccaggaggcggcaagcccggctgcagaaagagcttgcagaagcagcaaaggaacctctaccagtcgaacaggatgatgacattgaggtcattgtggatgaaacttctgatcacacagaagagacctctcctgtgcgagccatcagcagagcagccacgagacgctctgtctcttccttcccagtcccccaggacaatgtggatactcatcctggttctggtaaagaagtgagggtaccagctactgccttgtgtgtcttcgatgcacatgatggggaagtcaacgctgtgcagttcagtccaggttcccggttactggccactggaggcatggaccgcagggttaagctttgggaagtatttggagaaaaatgtgagttcaagggttccctatctggcagtaatgcaggaattacaagcattgaatttgatagtgctggatcttacctcttagcagcttcaaatgattttgcaagccgaatctggactgtggatgattatcgattacggcacacactcacgggacacagtgggaaagtgctgtctgctaagttcctgctggacaatgcgcggattgtctcaggaagtcacgaccggactctcaaactctgggatctacgcagcaaagtctgcataaagacagtgtttgcaggatccagttgcaatgatattgtctgcacagagcaatgtgtaatgagtggacattttgacaagaaaattcgtttctgggacattcgatcagagagcatagttcgagagatggagctgttgggaaagattactgccctggacttaaacccagaaaggactgagctcctgagctgctcccgtgatgacttgctaaaagttattgatctccgaacaaatgctatcaagcagacattcagtgcacctgggttcaagtgcggctctgactggaccagagttgtcttcagccctgatggcagttacgtggcggcaggctctgctgagggctctctgtatatctggagtgtgctcacagggaaagtggaaaaggttctttcaaagcagcacagctcatccatcaatgcggtggcgtggtcgccctctggctcgcacgttgtcagtgtggacaaaggatgcaaagctgtgctgtgggcacagtactgacggggctctcagggctgggaggaccccagtgccctcctcagaagaagcacatgggctcctgcagccctgtcctggcaggtgatgtgctgggtatagcatggacctcccagagaagctcaagctatgtggcactgtagctttgccgtgaatgggatttctgaagatttgactgaggtctctcttggcctggaagaataacactgaaaaaacctgacgctgcggtcacttagcagaggctcaggttcttgccttgggaaacactactagctctgaccttccatacctcacttgggggagcacagggccccgctgggcctcctcaccaacggcagtgccaaaatcagcccccacatcaaggtggtgttctctgtgctttctctcgtccttccaaagtcggttctggcctaacgcatgtcccaacaccttgggttcatttgcccggtgaactcactttaagcattggattaacggaaactcccgaactacagacccctccctggtgggttgcatgaatgtgtctcattactgctgaaatgtcctcacatctctttcactgttcttcagagctttctggctctctttcccccacaaaattcgacatatttaaaaatctccgtgtggctttaaaaaatggttttttgtttttttgtttttttgaggtgggagaggatgtgtgaaaatcttttccagggaaatgggttcgctgcagaggtaaggatgtgttcctgtatcgatctgcagacacccagaaggtgggtgcacactgcatgcttgggggtgccaagggattcgagacctccaacatacttgtctgaaggtggtgattctggccatggcccctctgccaagcctgtgtgcgatgcccttggtgctttagtgcaagaagcctaggctcagaagcacagcagcgccatctttccgtttcaggggttgtgatgaaggccaaggaaaaacatttatctttactattttacctacgtataaagttttagttcattgggtgtgcgaaacaccctttttatcacttttaaatttgcactttattttttttcttccatgcttgttctctggacatttggggatgtgagtgttagagctggtgagagaggagtcaggtggccttcccaccgatggtcctggcctccacctgccctctcttccctgcctgatcaccgctttccaatttgcccttcagagaacttaagtcaaggagagttgaaattcacaggccagggcacatcttttatttatttcattatgttggccaacagaacttgattgtaaataataataaagaaatctgttatatacttttcaaaaaaaaaaaaaaaaaaaaa

SEQ ID NO: 14 - protein, 504 aa, Homosapiens
MAQLRIKHQEELTELHKKRGELAQLVIDLNNQMQRKDREMQMNEAKIAECLQTISDLETECLDLRTKLCDLERANQTLKDEYDALQITFTALEGKLRKTTEENQELVTRWMAEKAQEANRLNAENEKDSRRRQARLQKELAEAAKEPLPVEQDDDIEVIVDETSDHTEETSPVRAISRAATRRSVSSFPVPQDNVDTHPGSGKEVRVPATALCVFDAHDGEVNAVQFSPGSRLLATGGMDRRVKLWEVFGEKCEFKGSLSGSNAGITSIEFDSAGSYLLAASNDFASRIWTVDDYRLRHTLTGHSGKVLSAKFLLDNARIVSGSHDRTLKLWDLRSKVCIKTVFAGSSCNDIVCTEQCVMSGHFDKKIRFWDIRSESIVREMELLGKITALDLNPERTELLSCSRDDLLKVIDLRTNAIKQTFSAPGFKCGSDWTRVVFSPDGSYVAAGSAEGSLYIWSVLTGKVEKVLSKQHSSSINAVAWSPSGSHVVSVDKGCKAVLWAQY

SEQ ID NO: 15 - DNA, 3333 bp, Homosapiens
atttccggcatgagccggaagaccgtcccggatggcctcggggactgccagtgtgtggaggtgagctccgggattgccggcattcccgcttctgctggttgcttcatgctgcaggctgcggccgtcagccctcgctcgcattggtggcgctgaggtgccggggcagcaagtgacatgtcgtcgggcctccgcgccgctgacttcccccgctggaagcgccacatctcggagcaactgaggcgccgggaccggctgcagagacaggcgttcgaggagatcatcctgcaataacaaattgctggaaaagtcagatcttcattcagtgttggcccagaaactacaggctgaaaagcatgacgtaccaaacaggcacgagataagtcccggacatgatggcacatggaatgacaatcagctacaagaaatggcccaactgaggattaagcaccaagaggaactgactgaattacacaagaaacgtggggagttagctcaactggtgattgacctgaataaccaaatgcagcggaaggacagggagatgcagatgaatgaagcaaaaattgcagaatgtttgcagactatctctgacctggagacggagtgcctagacctgcgcactaagctttgtgaccttgaaagagccaaccagaccctgaaggatgaatatgatgccctgcagatcacttttactgccttggagggaaaactgaggaaaactacggaagagaaccaggagctggtcaccagatggatggctgagaaagcccaggaagccaatcggcttaatgcagagaatgaaaaagactccaggaggcggcaagcccggctgcagaaagagcttgcagaagcagcaaaggaacctctaccagtcgaacaggatgatgacattgaggtcattgtggatgaaacttctgatcacacagaagagacctctcctgtgcgagccatcagcagagcagccactaagcgactctcgcagcctgctggaggccttctggattctatcactaatatctttgggagacgctctgtctcttccttcccagtcccccaggacaatgtggatactcatcctggttctggtaaagaagtgagggtaccagctactgccttgtgtgtcttcgatgcacatgatggggaagtcaacgctgtgcagttcagtccaggttcccggttactggccactggaggcatggaccgcagggttaagctttgggaagtatttggagaaaaatgtgagttcaagggttccctatctggcagtaatgcaggaattacaagcattgaatttgatagtgctggatcttacctcttagcagcttcaaatgattttgcaagccgaatctggactgtggatgattatcgattacggcacacactcacgggacacagtgggaaagtgctgtctgctaagttcctgctggacaatgcgcggattgtctcaggaagtcacgaccggactctcaaactctgggatctacgcagcaaagtctgcataaagacagtgtttgcaggatccagttgcaatgatattgtctgcacagagcaatgtgtaatgagtggacattttgacaagaaaattcgtttctgggacattcgatcagagagcatagttcgagagatggagctgttgggaaagattactgccctggacttaaacccagaaaggactgagctcctgagctgctcccgtgatgacttgctaaaagttattgatctccgaacaaatgctatcaagcagacattcagtgcacctgggttcaagtgcggctctgactggaccagagttgtcttcagccctgatggcagttacgtggcggcaggctctgctgagggctctctgtatatctggagtgtgctcacagggaaagtggaaaaggttctttcaaagcagcacagctcatccatcaatgcggtggcgtggtcgccctctggctcgcacgttgtcagtgtggacaaaggatgcaaagctgtgctgtgggcacagtactgacggggctctcagggctgggaggaccccagtgccctcctcagaagaagcacatgggctcctgcagccctgtcctggcaggtgatgtgctgggtatagcatggacctcccagagaagctcaagctatgtggcactgtagctttgccgtgaatgggatttctgaagatttgactgaggtctctcttggcctggaagaataacactgaaaaaacctgacgctgcggtcacttagcagaggctcaggttcttgccttgggaaacactactagctctgaccttccatacctcacttgggggagcacagggccccgctgggcctcctcaccaacggcagtgccaaaatcagcccccacatcaaggtggtgttctctgtgctttctctcgtccttccaaagtcggttctggcctaacgcatgtcccaacaccttgggttcatttgcccggtgaactcactttaagcattggattaacggaaactcccgaactacagacccctccctggtgggttgcatgaatgtgtctcattactgctgaaatgtcctcacatctctttcactgttcttcagagctttctggctctctttcccccacaaaattcgacatatttaaaaatctccgtgtggctttaaaaaatggttttttgtttttttgtttttttgaggtgggagaggatgtgtgaaaatcttttccagggaaatgggttcgctgcagaggtaaggatgtgttcctgtatcgatctgcagacacccagaaggtgggtgcacactgcatgcttgggggtgccaagggattcgagacctccaacatacttgtctgaaggtggtgattctggccatggcccctctgccaagcctgtgtgcgatgcccttggtgctttagtgcaagaagcctaggctcagaagcacagcagcgccatctttccgtttcaggggttgtgatgaaggccaaggaaaaacatttatctttactattttacctacgtataaagttttagttcattgggtgtgcgaaacaccctttttatcacttttaaatttgcactttattttttttcttccatgcttgttctctggacatttggggatgtgagtgttagagctggtgagagaggagtcaggtggccttcccaccgatggtcctggcctccacctgccctctcttccctgcctgatcaccgctttccaatttgcccttcagagaacttaagtcaaggagagttgaaattcacaggccagggcacatcttttatttatttcattatgttggccaacagaacttgattgtaaataataataaagaaatctgttatatacttttcaaaaaaaaaaaaaaaaaaaaa

SEQ ID NO: 16 - protein, 523 aa, Homosapiens
MAQLRIKHQEELTELHKKRGELAQLVIDLNNQMQRKDREMQMNEAKIAECLQTISDLETECLDLRTKLCDLERANQTLKDEYDALQITFTALEGKLRKTTEENQELVTRWMAEKAQEANRLNAENEKDSRRRQARLQKELAEAAKEPLPVEQDDDIEVIVDETSDHTEETSPVRAISRAATKRLSQPAGGLLDSITNIFGRRSVSSFPVPQDNVDTHPGSGKEVRVPATALCVFDAHDGEVNAVQFSPGSRLLATGGMDRRVKLWEVFGEKCEFKGSLSGSNAGITSIEFDSAGSYLLAASNDFASRIWTVDDYRLRHTLTGHSGKVLSAKFLLDNARIVSGSHDRTLKLWDLRSKVCIKTVFAGSSCNDIVCTEQCVMSGHFDKKIRFWDIRSESIVREMELLGKITALDLNPERTELLSCSRDDLLKVIDLRTNAIKQTFSAPGFKCGSDWTRVVFSPDGSYVAAGSAEGSLYIWSVLTGKVEKVLSKQHSSSINAVAWSPSGSHVVSVDKGCKAVLWAQY

SEQ ID NO: 17 - DNA, 2897 bp, Homosapiens
atttccggcatgagccggaagaccgtcccggatggcctcggggactgccagtgtgtggaggtgagctccgggattgccggcattcccgcttctgctggttgcttcatgctgcaggctgcggccgtcagccctcgctcgcattggtggcgctgaggtgccggggcagcaagtgacatgtcgtcgggcctccgcgccgctgacttcccccgctggaagcgccacatctcggagcaactgaggcgccgggaccggctgcagagacaggcgttcgaggagatcatcctgcaataacaaattgctggaaaagtcagatcttcattcagtgttggcccagaaactacaggctgaaaagcatgacgtaccaaacaggcacgagataaggaggcggcaagcccggctgcagaaagagcttgcagaagcagcaaaggaacctctaccagtcgaacaggatgatgacattgaggtcattgtggatgaaacttctgatcacacagaagagacctctcctgtgcgagccatcagcagagcagccaccgactctcgcagcctgctggaggccttctggattctatcactaatatctttgggagacgctctgtctcttccttcccagtcccccaggacaatgtggatactcatcctggttctggtaaagaagtgagggtaccagctactgccttgtgtgtcttcgatgcacatgatggggaagtcaacgctgtgcagttcagtccaggttcccggttactggccactggaggcatggaccgcagggttaagctttgggaagtatttggagaaaaatgtgagttcaagggttccctatctggcagtaatgcaggaattacaagcattgaatttgatagtgctggatcttacctcttagcagcttcaaatgattttgcaagccgaatctggactgtggatgattatcgattacggcacacactcacgggacacagtgggaaagtgctgtctgctaagttcctgctggacaatgcgcggattgtctcaggaagtcacgaccggactctcaaactctgggatctacgcagcaaagtctgcataaagacagtgtttgcaggatccagttgcaatgatattgtctgcacagagcaatgtgtaatgagtggacattttgacaagaaaattcgtttctgggacattcgatcagagagcatagttcgagagatggagctgttgggaaagattactgccctggacttaaacccagaaaggactgagctcctgagctgctcccgtgatgacttgctaaaagttattgatctccgaacaaatgctatcaagcagacattcagtgcacctgggttcaagtgcggctctgactggaccagagttgtcttcagccctgatggcagttacgtggcggcaggctctgctgagggctctctgtatatctggagtgtgctcacagggaaagtggaaaaggttctttcaaagcagcacagctcatccatcaatgcggtggcgtggtcgccctctggctcgcacgttgtcagtgtggacaaaggatgcaaagctgtgctgtgggcacagtactgacggggctctcagggctgggaggaccccagtgccctcctcagaagaagcacatgggctcctgcagccctgtcctggcaggtgatgtgctgggtatagcatggacctcccagagaagctcaagctatgtggcactgtagctttgccgtgaatgggatttctgaagatttgactgaggtctctcttggcctggaagaataacactgaaaaaacctgacgctgcggtcacttagcagaggctcaggttcttgccttgggaaacactactagctctgaccttccatacctcacttgggggagcacagggccccgctgggcctcctcaccaacggcagtgccaaaatcagcccccacatcaaggtggtgttctctgtgctttctctcgtccttccaaagtcggttctggcctaacgcatgtcccaacaccttgggttcatttgcccggtgaactcactttaagcattggattaacggaaactcccgaactacagacccctccctggtgggttgcatgaatgtgtctcattactgctgaaatgtcctcacatctctttcactgttcttcagagctttctggctctctttcccccacaaaattcgacatatttaaaaatctccgtgtggctttaaaaaatggttttttgtttttttgtttttttgaggtgggagaggatgtgtgaaaatcttttccagggaaatgggttcgctgcagaggtaaggatgtgttcctgtatcgatctgcagacacccagaaggtgggtgcacactgcatgcttgggggtgccaagggattcgagacctccaacatacttgtctgaaggtggtgattctggccatggcccctctgccaagcctgtgtgcgatgcccttggtgctttagtgcaagaagcctaggctcagaagcacagcagcgccatctttccgtttcaggggttgtgatgaaggccaaggaaaaacatttatctttactattttacctacgtataaagttttagttcattgggtgtgcgaaacaccctttttatcacttttaaatttgcactttattttttttcttccatgcttgttctctggacatttggggatgtgagtgttagagctggtgagagaggagtcaggtggccttcccaccgatggtcctggcctccacctgccctctcttccctgcctgatcaccgctttccaatttgcccttcagagaacttaagtcaaggagagttgaaattcacaggccagggcacatcttttatttatttcattatgttggccaacagaacttgattgtaaataataataaagaaatctgttatatacttttcaaaaaaaaaaaaaaaaaaaaa

SEQ ID NO: 18 - protein, 266 aa, Homosapiens
MDRRVKLWEVFGEKCEFKGSLSGSNAGITSIEFDSAGSYLLAASNDFASRIWTVDDYRLRHTLTGHSGKVLSAKFLLDNARIVSGSHDRTLKLWDLRSKVCIKTVFAGSSCNDIVCTEQCVMSGHFDKKIRFWDIRSESIVREMELLGKITALDLNPERTELLSCSRDDLLKVIDLRTNAIKQTFSAPGFKCGSDWTRVVFSPDGSYVAAGSAEGSLYIWSVLTGKVEKVLSKQHSSSINAVAWSPSGSHVVSVDKGCKAVLWAQY

SEQ ID NO: 19 - DNA, 1564 bp, Homosapiens
cccctacaaattccccacatcacgtaggccaggagcctcagcgctgccccttcaggctcatctggcaagacggtaccagcttgctcagaacaggggctggctattcatcatctcagagcatagagaccctctccttgccacccggcccttcccacctggttggtgacaatcacaaggtgtagaagttgccagggacagataacatggcagccagcgggaagaccagcaagtccgaaccgaaccatgttatcttcaagaagatctcccgggacaaatcggtgaccatctacctggggaacagagactacatagaccatgtcagccaagtccagcctgtggatggtgtcgtgttggttgatcctgatcttgtgaagggaaagaaagtgtatgtcactctgacctgcgccttccgctatggccaagaggacattgacgtgatcggcttgaccttccgcagggacctgtacttctcccgggtccaggtgtatcctcctgtgggggccgcgagcacccccacaaaactgcaagagagcctgcttaaaaagctggggagcaacacgtacccctttctcctgacgtttcctgactacttgccctgttcagtgatgttgcagccagctccacaagattcagggaagtcctgtggggttgactttgaggtcaaagcattcgccacagacagcaccgatgccgaagaggacaaaatccccaagaagagctccgtgcgattactgatccgcaaagtacagcatgccccacttgagatgggtccccagccccgagctgaggcggcctggcagttcttcatgtctgacaagcccctgcaccttgcggtctctctcaacaaagagatctatttccatggggagcccatccctgtgaccgtgactgtcaccaataacacagagaagaccgtgaagaagattaaagcattcgtggaacaggtggccaatgtggttctctactcgagtgattattacgtcaagcccgtggctatggaggaagcgcaagaaaaagtgccaccaaacagcactttgaccaagacgctgacgctgctgcccttgctggctaacaatcgagaaaggagaggcattgccctggatgggaaaatcaagcacgaggacacaaaccttgcctccagcaccatcattaaggagggcatagaccggaccgtcctgggaatcctggtgtcttaccagatcaaggtgaagctcacagtgtcaggctttctgggagagctcacctccagtgaagtcgccactgaggtcccattccgcctcatgcaccctcagcctgaggacccagctaaggaaagttatcaggatgcaaatttagtttttgaggagtttgctcgccataatctgaaagatgcaggagaagctgaggaggggaagagagacaagaatgacgctgatgagtgaagatgtcggctcaggatgccggaaaatgacctgtagttaccagtgcaacgagcaaagccccacagtttagtcctttggagttatgctgcgtatgaaaggatgagtcttcttccgagaaataaagcttgtttgttctcccctgg

SEQ ID NO: 20 - protein, 405 aa, Homosapiens
MAASGKTSKSEPNHVIFKKISRDKSVTIYLGNRDYIDHVSQVQPVDGVVLVDPDLVKGKKVYVTLTCAFRYGQEDIDVIGLTFRRDLYFSRVQVYPPVGAASTPTKLQESLLKKLGSNTYPFLLTFPDYLPCSVMLQPAPQDSGKSCGVDFEVKAFATDSTDAEEDKIPKKSSVRLLIRKVQHAPLEMGPQPRAEAAWQFFMSDKPLHLAVSLNKEIYFHGEPIPVTVTVTNNTEKTVKKIKAFVEQVANVVLYSSDYYVKPVAMEEAQEKVPPNSTLTKTLTLLPLLANNRERRGIALDGKIKHEDTNLASSTIIKEGIDRTVLGILVSYQIKVKLTVSGFLGELTSSEVATEVPFRLMHPQPEDPAKESYQDANLVFEEFARHNLKDAGEAEEGKRDKNDADE

SEQ ID NO: 21 - DNA, 6229 bp, Homosapiens
agagacacgaatatgtttcagccgcaacaggctgcgtttcagccggaagagtgaaagggcaccttgaaaacgcaagtttatgaatatgtttctgtactttcagaccatcatcaaagaggggatgctgaccaaacagaacaattcattccagcgatcaaaaaggagatactttaagcttcgagggcgaacgctttactatgccaaaacggcaaagtcaatcatatttgatgaggtggatctgacagatgccagcgtagctgaatccagtaccaaaaacgtcaacaacagttttacggtcataactccatgcaggaagctcatcttgtgtgctgataacagaaaagaaatggaagattggattgcagcattaaagactgtgcagaacagggagcactttgagcccacccagtacagcatggaccacttctcagggatgcacaattggtacgcctgttcccacgcgaggccgacctactgcaatgtgtgccgtgaggctctgtctggggtcacgtcgcacgggctgtcctgcgaggtgtgcaaatttaaggcccacaagcgctgtgctgtgcgtgcaaccaataactgcaagtggaccacactggcctcgatcgggaaggacatcattgaagatgcagatgggattgcaatgccccaccagtggttggaaggaaacctacctgtgagcgccaagtgcactgtgtgcgacaagacctgtggcagtgtgctgcgcctgcaggactggcgctgcctctggtgcaaggccatggttcacacatcgtgtaaagaatccttgctgaccaagtgcccacttggcctgtgcaaagtgtcagtcatcccacccacggctctcaacagcatcgactccgatgggttctggaaggccagctgtcctccttcttgcacaagcccactgttggtcttcgtcaattcaaaaagtggggacaaccagggtgtgaagttcctcagaagattcaaacagctactaaaccccgcccaggtcttcgacctcatgaacggaggcccacacctcggcttacggttattccagaagtttgacacattccggattctggtttgtggcggggatggaagtgttggctgggtcctctccgaaatcgacagcctcaaccttcataaacagtgtcagctgggagtgctgccgctcggcacagggaacgacttggcccgagtactgggctggggctcagcctgcgatgacgacacccagctcccccagatcttggagaagttggagagagccagcaccaagatgctggacaggtggagcgtcatggcatacgaggccaagctcccccggcaggcctcctcctctaccgtcaccgaagacttcagcgaggattccgaggtacagcagattctcttctatgaagactcggttgcagcccacctttctaaaatcctcacctcggaccagcactcggtggtcatctcctcggccaaagtgctctgtgagacggtgaaggacttcgtggcacgggtggggaaggcctatgagaagacgaccgagagctcggaggagtcagaggtcatggccaagaagtgctctgtcctgaaagagaagctggattcccttctcaagaccttggacgatgagtcccaggcctcgtcctctctgcccaacccgccccccaccattgccgaggaggctgaagatggagatgggtcgggcagcatctgcggttccaccggagaccgcttggtggcatcagcttgcccggcccggccgcagatattccggcctcgagaacagctcatgctgagagccaacagcctgaagaaagcaattcgtcagatcatagaacacacagaaaaagctgtcgatgagcagaatgcccagacccaggagcaggagggcttcgtcctgggcctctctgagtcagaggagaagatggaccacagagtgtgcccaccactgtcccacagcgagagcttcggggtccccaaggggaggagccagcgcaaagtgtcgaaatctccgtgtgaaaagctgatcagcaaagggagtctgtccctaggcagttctgcttcccttccgccccagccgggaagccgggacggcctgcctgcgctcaacaccaagatcctgtacccaaatgtccgggctggaatgtctggttccttacccggtggctcagtcatcagtcgcctgttaattaatgctgatcccttcaactctgaaccagaaaccctagagtattacacggagaaatgtgtcatgaacaactattttggcattggcctggatgcgaagatatccctggactttaacaacaagcgcgatgagcacccagagaagtgcaggagccgaaccaagaacatgatgtggtatggagttcttggaaccaaagagttgctgcacagaacctacaagaacctggagcaaaaggtcttgctggagtgtgacgggcgacccatcccactccccagtcttcagggaattgctgtccttaacattcccagctatgccggaggaaccaacttctgggggggtaccaaggaagatgatactttcgcagctccatcattcgatgacaagattctggaggtggtcgccgtgttcggcagcatgcagatggccgtctctcgagtcatcaggctacagcatcatcggatcgcccagtgtcgcacggtgaagatctccatccttggggatgagggcgtgcctgtgcaggtggacggagaggcctgggtccagccgccagggtacattcggattgtccacaagaaccgggcacagacactgaccagagacagggcatttgagagcaccctgaagtcctgggaagacaagcagaagtgcgagctgccccgccctccatcctgttccctgcacccggagatgctgtccgaggaggaggccacccagatggaccagtttgggcaggcagcaggggtcctcattcacagtatccgagaaatagctcagtctcaccgggacatggagcaggaactggcccacgccgtcaatgccagctccaagtccatggaccgtgtgtatggcaagcccagaaccacagaggggctcaactgcagcttcgtcctggaaatggtgaataacttcagagctctgcgcagtgagacggagctgctgctgtctgggaagatggccctgcagctggatccgcctcagaaggagcagctggggagtgctcttgccgagatggaccgacagctcaggaggctggcagacaccccgtggctctgccagtccgcagagcccggcgacgaagagagtgtgatgctggatcttgccaagcgcagtcgcagtggtaaattccgcctcgtgaccaagtttaaaaaggagaaaaacaacaagaacaaagaagctcacagtagcctgggagccccggttcacctctgggggacagaggaggttgctgcctggctggagcacctcagtctctgtgagtataaggacatcttcacacggcacgacatccggggctctgagctcctgcacctggagcggagggacctcaaggacctgggcgtgaccaaggtgggccacatgaagaggatcctgtgtggcatcaaggagctgagccgcagcgcccccgccgtcgaggcctagcctctgtcctctcagcctgtggcctccacatccccgccgccgaggcctagcctccgccctctcagcctgtggcctctgcgcctcctgccactgaggccctgggcagatgctgcagcccgcccccttctcatggtgctacttcctctgtcagctacagaaagcctccgtgacaccgtccaccagagctctggggtctcgaacataacaacacagctacctttgaaacaacactttctccagctcagagtcacctggggcacatgtgtcacggccactcagctctcgcccgcctgtgctgtgggccagggaatccagcggcgtctggcctcctgggcactgcttgcctggcctcgtgcttggattgtcccgggggctcctctccgtgtgtccttctgtggccgcaccgtgtggctccgcctcctggcccccagccagttctcagaaacgtggctggggcccagcacagcagcctgcaagggcccctgtttgttgatgcagcttttgttgaacaaaaatcgtgctctttcctggtttgaaagtagcatggatgtttccagtcttgttgattgtaatttgacgtgaagagaaaaaaaaattcctcctgcgtgagccaaggcagcgggtgctgtttcccaggcggggagcccctccctgggtgtcacagggcctgtgctcctccctcctccatcctctctcctcccgctcctccctccccccactgtgggctggggacgcctgcccttctgtctccggacgctctaggcgagttcagcttggggtgtgagtgagacagcttgccagctgcatccctgcagacagaggatgtgtgtccacatgagtgtttctgtgtgggaaatgcttcctggctctgggaaactttttctgcccattctgtggttcccagggagcgtggccctggtgggccaggggtggtttgacctcttcagcccgtccggtggcctggaggccggaggctctcctgagtgtctgcccctgcagtggcttcttgtcgcctgctgctgggcgtgatgtcgctggaggtgctggcagggactctgatttggtggtccgcgctgcccctgccctgcctctgtcctggctctgaactagtagatgatggtgccagagggcagggagctcgcctggggagagggctgtgccccgtagggacagtgcccaggtgaaggatgcccctggtcctccagggcactgactttgcccttttttcccgttgatagtcatggctcagaggtgcttgtaaatgtcttgggaagaggtttctgtaacccctgccctggtgtgaggaggaaatggctctggcctggctgcctggccgtggcttctctttggctcccaaagagaaggacagtgttgggagtatctgccgtggcttctctttggctcccaaagagaaggacagtgttgggagtatctgccggcgctgtccaggtcctttagtcagcgtcactccatctgatgtgcagaagctgggctgcacctgcgggggtgggcatagaccgggctgggtctgcagcagcccctggtcctgagcaggcggcagtgaacagcactggcccacctcccactcacagcccctctgtcccctctgcagtgcacccaggtgggcccctctgcgtgcctttgggtgctcccctctcgtggtcgttctggcccgaggcccttagagtatggaggctgagccaggccttgggtttccccagcacagcctcctgtcgctgcatgcgacgtgttgggatttttggatgaaagactctcccacgctctgttggtggacttagctgcctcactggaagtgatgtgggtggaaggtggttgtatgttaccttttccacctctcattgttttccccagaacattgtagatgggggttggcagagggagaaataagccagccacggcagtcgcttggtttcccaggtggaatgggctaacacaggagatgatgggaacctgtcccgcagtccctgcatgaccattggccctgctggcctggcgatgtgggcatcctggggttcttagggtcccagaacaagccccaggcaagctggaacttgggtggggaggggacatgaggaggataaacagctgactgtggcttcaaggacatcagggccaccccaagtcctcagtgtcctactcctggcaaggagttgggtttggatcaaaagtgtttaaaattaatatgttgtcagtgattagaacaacactgtttacataaaaaccatttttctaattctaacaagttagaatgtgaggaaggaatgaacatgagtgtttaggaacctgccctttggtgctgggctggcgtcccgcactggggtgtcctcgctgtctgggggctgctctgctgccccggcccaggtccccttgtggtgttgccagacgggcctcatggtctgctgtgcagagagaggcaggaaggatccctgaagagtcttggagaaaaggttctgtgccctcaggtggggcttaccccctcgtatttataatcttaatttatatagtgaccaccgtggaaacaaacgcctcttgtattgtcatgtacatagtccatacctgagtgctgtacataagttgttctgtgtataaataaaacaagcctgtttttgatcttcc

SEQ ID NO: 22 - protein, 1170 aa, Homosapiens
MNMFLYFQTIIKEGMLTKQNNSFQRSKRRYFKLRGRTLYYAKTAKSIIFDEVDLTDASVAESSTKNVNNSFTVITPCRKLILCADNRKEMEDWIAALKTVQNREHFEPTQYSMDHFSGMHNWYACSHARPTYCNVCREALSGVTSHGLSCEVCKFKAHKRCAVRATNNCKWTTLASIGKDIIEDADGIAMPHQWLEGNLPVSAKCTVCDKTCGSVLRLQDWRCLWCKAMVHTSCKESLLTKCPLGLCKVSVIPPTALNSIDSDGFWKASCPPSCTSPLLVFVNSKSGDNQGVKFLRRFKQLLNPAQVFDLMNGGPHLGLRLFQKFDTFRILVCGGDGSVGWVLSEIDSLNLHKQCQLGVLPLGTGNDLARVLGWGSACDDDTQLPQILEKLERASTKMLDRWSVMAYEAKLPRQASSSTVTEDFSEDSEVQQILFYEDSVAAHLSKILTSDQHSVVISSAKVLCETVKDFVARVGKAYEKTTESSEESEVMAKKCSVLKEKLDSLLKTLDDESQASSSLPNPPPTIAEEAEDGDGSGSICGSTGDRLVASACPARPQIFRPREQLMLRANSLKKAIRQIIEHTEKAVDEQNAQTQEQEGFVLGLSESEEKMDHRVCPPLSHSESFGVPKGRSQRKVSKSPCEKLISKGSLSLGSSASLPPQPGSRDGLPALNTKILYPNVRAGMSGSLPGGSVISRLLINADPFNSEPETLEYYTEKCVMNNYFGIGLDAKISLDFNNKRDEHPEKCRSRTKNMMWYGVLGTKELLHRTYKNLEQKVLLECDGRPIPLPSLQGIAVLNIPSYAGGTNFWGGTKEDDTFAAPSFDDKILEVVAVFGSMQMAVSRVIRLQHHRIAQCRTVKISILGDEGVPVQVDGEAWVQPPGYIRIVHKNRAQTLTRDRAFESTLKSWEDKQKCELPRPPSCSLHPEMLSEEEATQMDQFGQAAGVLIHSIREIAQSHRDMEQELAHAVNASSKSMDRVYGKPRTTEGLNCSFVLEMVNNFRALRSETELLLSGKMALQLDPPQKEQLGSALAEMDRQLRRLADTPWLCQSAEPGDEESVMLDLAKRSRSGKFRLVTKFKKEKNNKNKEAHSSLGAPVHLWGTEEVAAWLEHLSLCEYKDIFTRHDIRGSELLHLERRDLKDLGVTKVGHMKRILCGIKELSRSAPAVEA

SEQ ID NO: 23 - DNA, 6294 bp, Homosapiens
tggcccggcagcatggcggcggcggcgggcgcccctccgccgggtcccccgcaaccgcctccgccgccgccgcccgaggagtcgtccgacagcgagcccgaggcggagcccggctccccacagaagctcatccgcaaggtgtccacgtcgggtcagatccgacagaagaccatcatcaaagaggggatgctgaccaaacagaacaattcattccagcgatcaaaaaggagatactttaagcttcgagggcgaacgctttactatgccaaaacggcaaagtcaatcatatttgatgaggtggatctgacagatgccagcgtagctgaatccagtaccaaaaacgtcaacaacagttttacggtcataactccatgcaggaagctcatcttgtgtgctgataacagaaaagaaatggaagattggattgcagcattaaagactgtgcagaacagggagcactttgagcccacccagtacagcatggaccacttctcagggatgcacaattggtacgcctgttcccacgcgaggccgacctactgcaatgtgtgccgtgaggctctgtctggggtcacgtcgcacgggctgtcctgcgaggtgtgcaaatttaaggcccacaagcgctgtgctgtgcgtgcaaccaataactgcaagtggaccacactggcctcgatcgggaaggacatcattgaagatgcagatgggattgcaatgccccaccagtggttggaaggaaacctacctgtgagcgccaagtgcactgtgtgcgacaagacctgtggcagtgtgctgcgcctgcaggactggcgctgcctctggtgcaaggccatggttcacacatcgtgtaaagaatccttgctgaccaagtgcccacttggcctgtgcaaagtgtcagtcatcccacccacggctctcaacagcatcgactccgatgggttctggaaggccagctgtcctccttcttgcacaagcccactgttggtcttcgtcaattcaaaaagtggggacaaccagggtgtgaagttcctcagaagattcaaacagctactaaaccccgcccaggtcttcgacctcatgaacggaggcccacacctcggcttacggttattccagaagtttgacacattccggattctggtttgtggcggggatggaagtgttggctgggtcctctccgaaatcgacagcctcaaccttcataaacagtgtcagctgggagtgctgccgctcggcacagggaacgacttggcccgagtactgggctggggctcagcctgcgatgacgacacccagctcccccagatcttggagaagttggagagagccagcaccaagatgctggacaggtggagcgtcatggcatacgaggccaagctcccccggcaggcctcctcctctaccgtcaccgaagacttcagcgaggattccgaggtacagcagattctcttctatgaagactcggttgcagcccacctttctaaaatcctcacctcggaccagcactcggtggtcatctcctcggccaaagtgctctgtgagacggtgaaggacttcgtggcacgggtggggaaggcctatgagaagacgaccgagagctcggaggagtcagaggtcatggccaagaagtgctctgtcctgaaagagaagctggattcccttctcaagaccttggacgatgagtcccaggcctcgtcctctctgcccaacccgccccccaccattgccgaggaggctgaagatggagatgggtcgggcagcatctgcggttccaccggagaccgcttggtggcatcagcttgcccggcccggccgcagatattccggcctcgagaacagctcatgctgagagccaacagcctgaagaaagcaattcgtcagatcatagaacacacagaaaaagctgtcgatgagcagaatgcccagacccaggagcaggagggcttcgtcctgggcctctctgagtcagaggagaagatggaccacagagtgtgcccaccactgtcccacagcgagagcttcggggtccccaaggggaggagccagcgcaaagtgtcgaaatctccgtgtgaaaagctgatcagcaaagggagtctgtccctaggcagttctgcttcccttccgccccagccgggaagccgggacggcctgcctgcgctcaacaccaagatcctgtacccaaatgtccgggctggaatgtctggttccttacccggtggctcagtcatcagtcgcctgttaattaatgctgatcccttcaactctgaaccagaaaccctagagtattacacggagaaatgtgtcatgaacaactattttggcattggcctggatgcgaagatatccctggactttaacaacaagcgcgatgagcacccagagaagtgcaggagccgaaccaagaacatgatgtggtatggagttcttggaaccaaagagttgctgcacagaacctacaagaacctggagcaaaaggtcttgctggagtgtgacgggcgacccatcccactccccagtcttcagggaattgctgtccttaacattcccagctatgccggaggaaccaacttctgggggggtaccaaggaagatgatactttcgcagctccatcattcgatgacaagattctggaggtggtcgccgtgttcggcagcatgcagatggccgtctctcgagtcatcaggctacagcatcatcggatcgcccagtgtcgcacggtgaagatctccatccttggggatgagggcgtgcctgtgcaggtggacggagaggcctgggtccagccgccagggtacattcggattgtccacaagaaccgggcacagacactgaccagagacagggcatttgagagcaccctgaagtcctgggaagacaagcagaagtgcgagctgccccgccctccatcctgttccctgcacccggagatgctgtccgaggaggaggccacccagatggaccagtttgggcaggcagcaggggtcctcattcacagtatccgagaaatagctcagtctcaccgggacatggagcaggaactggcccacgccgtcaatgccagctccaagtccatggaccgtgtgtatggcaagcccagaaccacagaggggctcaactgcagcttcgtcctggaaatggtgaataacttcagagctctgcgcagtgagacggagctgctgctgtctgggaagatggccctgcagctggatccgcctcagaaggagcagctggggagtgctcttgccgagatggaccgacagctcaggaggctggcagacaccccgtggctctgccagtccgcagagcccggcgacgaagagagtgtgatgctggatcttgccaagcgcagtcgcagtggtaaattccgcctcgtgaccaagtttaaaaaggagaaaaacaacaagaacaaagaagctcacagtagcctgggagccccggttcacctctgggggacagaggaggttgctgcctggctggagcacctcagtctctgtgagtataaggacatcttcacacggcacgacatccggggctctgagctcctgcacctggagcggagggacctcaaggacctgggcgtgaccaaggtgggccacatgaagaggatcctgtgtggcatcaaggagctgagccgcagcgcccccgccgtcgaggcctagcctctgtcctctcagcctgtggcctccacatccccgccgccgaggcctagcctccgccctctcagcctgtggcctctgcgcctcctgccactgaggccctgggcagatgctgcagcccgcccccttctcatggtgctacttcctctgtcagctacagaaagcctccgtgacaccgtccaccagagctctggggtctcgaacataacaacacagctacctttgaaacaacactttctccagctcagagtcacctggggcacatgtgtcacggccactcagctctcgcccgcctgtgctgtgggccagggaatccagcggcgtctggcctcctgggcactgcttgcctggcctcgtgcttggattgtcccgggggctcctctccgtgtgtccttctgtggccgcaccgtgtggctccgcctcctggcccccagccagttctcagaaacgtggctggggcccagcacagcagcctgcaagggcccctgtttgttgatgcagcttttgttgaacaaaaatcgtgctctttcctggtttgaaagtagcatggatgtttccagtcttgttgattgtaatttgacgtgaagagaaaaaaaaattcctcctgcgtgagccaaggcagcgggtgctgtttcccaggcggggagcccctccctgggtgtcacagggcctgtgctcctccctcctccatcctctctcctcccgctcctccctccccccactgtgggctggggacgcctgcccttctgtctccggacgctctaggcgagttcagcttggggtgtgagtgagacagcttgccagctgcatccctgcagacagaggatgtgtgtccacatgagtgtttctgtgtgggaaatgcttcctggctctgggaaactttttctgcccattctgtggttcccagggagcgtggccctggtgggccaggggtggtttgacctcttcagcccgtccggtggcctggaggccggaggctctcctgagtgtctgcccctgcagtggcttcttgtcgcctgctgctgggcgtgatgtcgctggaggtgctggcagggactctgatttggtggtccgcgctgcccctgccctgcctctgtcctggctctgaactagtagatgatggtgccagagggcagggagctcgcctggggagagggctgtgccccgtagggacagtgcccaggtgaaggatgcccctggtcctccagggcactgactttgcccttttttcccgttgatagtcatggctcagaggtgcttgtaaatgtcttgggaagaggtttctgtaacccctgccctggtgtgaggaggaaatggctctggcctggctgcctggccgtggcttctctttggctcccaaagagaaggacagtgttgggagtatctgccgtggcttctctttggctcccaaagagaaggacagtgttgggagtatctgccggcgctgtccaggtcctttagtcagcgtcactccatctgatgtgcagaagctgggctgcacctgcgggggtgggcatagaccgggctgggtctgcagcagcccctggtcctgagcaggcggcagtgaacagcactggcccacctcccactcacagcccctctgtcccctctgcagtgcacccaggtgggcccctctgcgtgcctttgggtgctcccctctcgtggtcgttctggcccgaggcccttagagtatggaggctgagccaggccttgggtttccccagcacagcctcctgtcgctgcatgcgacgtgttgggatttttggatgaaagactctcccacgctctgttggtggacttagctgcctcactggaagtgatgtgggtggaaggtggttgtatgttaccttttccacctctcattgttttccccagaacattgtagatgggggttggcagagggagaaataagccagccacggcagtcgcttggtttcccaggtggaatgggctaacacaggagatgatgggaacctgtcccgcagtccctgcatgaccattggccctgctggcctggcgatgtgggcatcctggggttcttagggtcccagaacaagccccaggcaagctggaacttgggtggggaggggacatgaggaggataaacagctgactgtggcttcaaggacatcagggccaccccaagtcctcagtgtcctactcctggcaaggagttgggtttggatcaaaagtgtttaaaattaatatgttgtcagtgattagaacaacactgtttacataaaaaccatttttctaattctaacaagttagaatgtgaggaaggaatgaacatgagtgtttaggaacctgccctttggtgctgggctggcgtcccgcactggggtgtcctcgctgtctgggggctgctctgctgccccggcccaggtccccttgtggtgttgccagacgggcctcatggtctgctgtgcagagagaggcaggaaggatccctgaagagtcttggagaaaaggttctgtgccctcaggtggggcttaccccctcgtatttataatcttaatttatatagtgaccaccgtggaaacaaacgcctcttgtattgtcatgtacatagtccatacctgagtgctgtacataagttgttctgtgtataaataaaacaagcctgtttttgatcttcc

SEQ ID NO: 24 - protein, 1214 aa, Homosapiens
MAAAAGAPPPGPPQPPPPPPPEESSDSEPEAEPGSPQKLIRKVSTSGQIRQKTIIKEGMLTKQNNSFQRSKRRYFKLRGRTLYYAKTAKSIIFDEVDLTDASVAESSTKNVNNSFTVITPCRKLILCADNRKEMEDWIAALKTVQNREHFEPTQYSMDHFSGMHNWYACSHARPTYCNVCREALSGVTSHGLSCEVCKFKAHKRCAVRATNNCKWTTLASIGKDIIEDADGIAMPHQWLEGNLPVSAKCTVCDKTCGSVLRLQDWRCLWCKAMVHTSCKESLLTKCPLGLCKVSVIPPTALNSIDSDGFWKASCPPSCTSPLLVFVNSKSGDNQGVKFLRRFKQLLNPAQVFDLMNGGPHLGLRLFQKFDTFRILVCGGDGSVGWVLSEIDSLNLHKQCQLGVLPLGTGNDLARVLGWGSACDDDTQLPQILEKLERASTKMLDRWSVMAYEAKLPRQASSSTVTEDFSEDSEVQQILFYEDSVAAHLSKILTSDQHSVVISSAKVLCETVKDFVARVGKAYEKTTESSEESEVMAKKCSVLKEKLDSLLKTLDDESQASSSLPNPPPTIAEEAEDGDGSGSICGSTGDRLVASACPARPQIFRPREQLMLRANSLKKAIRQIIEHTEKAVDEQNAQTQEQEGFVLGLSESEEKMDHRVCPPLSHSESFGVPKGRSQRKVSKSPCEKLISKGSLSLGSSASLPPQPGSRDGLPALNTKILYPNVRAGMSGSLPGGSVISRLLINADPFNSEPETLEYYTEKCVMNNYFGIGLDAKISLDFNNKRDEHPEKCRSRTKNMMWYGVLGTKELLHRTYKNLEQKVLLECDGRPIPLPSLQGIAVLNIPSYAGGTNFWGGTKEDDTFAAPSFDDKILEVVAVFGSMQMAVSRVIRLQHHRIAQCRTVKISILGDEGVPVQVDGEAWVQPPGYIRIVHKNRAQTLTRDRAFESTLKSWEDKQKCELPRPPSCSLHPEMLSEEEATQMDQFGQAAGVLIHSIREIAQSHRDMEQELAHAVNASSKSMDRVYGKPRTTEGLNCSFVLEMVNNFRALRSETELLLSGKMALQLDPPQKEQLGSALAEMDRQLRRLADTPWLCQSAEPGDEESVMLDLAKRSRSGKFRLVTKFKKEKNNKNKEAHSSLGAPVHLWGTEEVAAWLEHLSLCEYKDIFTRHDIRGSELLHLERRDLKDLGVTKVGHMKRILCGIKELSRSAPAVEA

SEQ ID NO: 25 - DNA, 3744 bp, Homosapiens
atgtcactttttttaagggtagtatttagtttcacaatgtttggggacctgtttgaagaggagtattccactgtgtctaataatcagtatggaaaagggaagaaattaaagactaaagctttggagccacctgctcctagagaattcaccaatttaagcggaatcagaaatcagggtggaacctgttacctcaattcccttcttcagactcttcatttcacacctgaattcagagaagctctattttctcttggcccagaagagcttggtttgtttgaagataaggataaacccgatgcaaaggttcgaatcatccctttacagttacagcgcttgtttgctcagcttctgctcttagaccaggaagctgcatccacagcagacctcactgacagctttgggtggaccagtaatgaggaaatgaggcaacatgatgtgcaggaactgaatcgaatcctcttcagcgctttggaaacttctttagttgggacctccggtcatgacctcatctatcgtctgtaccatggaaccattgttaaccagattgtttgtaaagaatgtaagaacgttagcgagaggcaggaagacttcttagatctaacagtagcagtcaaaaatgtatccggtttggaagatgctctctggaacatgtatgtagaagaggaagtttttgattgtgacaacttgtaccactgtggaacttgtgacaggctggttaaagcagcaaagtcggccaaattacgtaagctgcctccttttcttactgtttcattactaagatttaattttgattttgtgaaatgcgaacgctacaaggaaactagctgttatacattccctctccggattaatctcaagcccttttgtgaacagagtgaattggatgacttagaatatatatatgacctcttctcagttattatacacaaaggtggctgctacggaggccattaccatgtatatattaaagatgttgatcatttgggaaactggcagtttcaagaggaaaaaagtaaaccagatgtgaatctgaaagatctccagagtgaagaagagattgatcatccactgatgattctaaaagcaatcttattagaggagaataatctaattcctgttgatcagctgggccagaaacttttgaaaaagataggaatatcttggaacaagaagtacagaaaacagcatggaccattgcggaagttcttacagctccattctcagatatttctactcagttcagatgaaagtacagttcgtctcttgaagaatagttctctccaggctgagtctgatttccaaaggaatgaccagcaaattttcaagatgcttcctccagaatccccaggtttaaacaatagcatctcctgtccccactggtttgatataaatgattctaaagtccagccaatcagggaaaaggatattgaacagcaatttcagggtaaagaaagtgcctacatgttgttttatcggaaatcccagttgcagagaccccctgaagctcgagctaatccaagatatggggttccatgtcatttactgaatgaaatggatgcagctaacattgaactgcaaaccaaaagggcagaatgtgattctgcaaacaatacttttgaattgcatcttcacctgggccctcagtatcatttcttcaatggggctctgcacccagtagtctctcaaacagaaagcgtgtgggatttgacctttgataaaagaaaaactttaggagatctccggcagtcaatatttcagctgttagaattttgggaaggagacatggttcttagtgttgcaaagcttgtaccagcaggacttcacatttaccagtcacttggcggggatgaactgacactgtgtgaaactgaaattgctgatggggaagacatctttgtgtggaatggggtggaggttggtggagtccacattcaaactggtattgactgcgaacctctacttttaaatgttcttcatctagacacaagcagtgatggagaaaagtgttgtcaggtgatagaatctccacatgtctttccagctaatgcagaagtgggcactgtcctcacagccttagcaatcccagcaggtgtcatcttcatcaacagtgctggatgtccaggtggggagggttggacggccatccccaaggaagacatgaggaagacgttcagggagcaagggctcagaaatggaagctcaattttaattcaggattctcatgatgataacagcttgttgaccaaggaagagaaatgggtcactagtatgaatgagattgactggctccacgttaaaaatttatgccagttagaatctgaagagaagcaagttaaaatatcagcaactgttaacacaatggtgtttgatattcgaattaaagccataaaggaattaaaattaatgaaggaactagctgacaacagctgtttgagacctattgatagaaatgggaagcttctttgtccagtgccggacagctatactttgaaggaagcagaattgaagatgggaagttcattgggactgtgtcttggaaaagcaccaagttcgtctcagttgttcctgttttttgcaatggggagtgacgttcaacctgggacagaaatggaaatcgtagtagaagaaacaatatctgtgagagattgtttaaagttaatgctgaagaaatctggcctacaaggagatgcctggcatttacgaaaaatggattggtgctatgaagctggagagcctttatgtgaagaagatgcaacactgaaagaacttctgatatgttctggagatactttgcttttaattgaaggacaacttcctcctctgggtttcctgaaggtgcccatctggtggtaccagcttcagggtccctcaggacactgggagagtcatcaggaccagaccaactgtacttcgtcttggggcagagtttggagagccacttccagccaaggtgcttctgggaacgagcctgcgcaagtttctctcctctacttgggagacatagagatctcagaagatgccacgctggcggagctgaagtctcaggccatgaccttgcctcctttcctggagttcggtgtcccgtccccagcccacctcagagcctggacggtggagaggaagcgcccaggcaggcttttacgaactgaccggcagccactcagggaatataaactaggacggagaattgagatctgcttagagccccttcagaaaggcgaaaacttgggcccccaggacgtgctgctgaggacacaggtgcgcatccctggtgagaggacctatgcccctgccctggacctggtgtggaacgcggcccagggtgggactgccggctccctgaggcagagagttgccgatttctatcgtcttcccgtggagaagattgaaattgccaaatactttcccgaaaagttcgagtggcttccgatatctagctggaaccaacaaataaccaagaggaaaaagaaaaaaaaacaagattatttgcaaggggcaccgtattacttgaaagacggagatactattggtgttaagaatctcctgattgacgacgatgatgatttcagtacaatcagagatgacactggaaaagaaaagcagaaacaacgggccctggggagaaggaaaagccaagaagccctccatgagcagagcagctacatcctctccagtgcagagacgcctgcccggccccgagccccggaaacttctctctccatccacgtggggagcttcagataa

SEQ ID NO: 26 - protein, 1247 aa, Homosapiens
MSLFLRVVFSFTMFGDLFEEEYSTVSNNQYGKGKKLKTKALEPPAPREFTNLSGIRNQGGTCYLNSLLQTLHFTPEFREALFSLGPEELGLFEDKDKPDAKVRIIPLQLQRLFAQLLLLDQEAASTADLTDSFGWTSNEEMRQHDVQELNRILFSALETSLVGTSGHDLIYRLYHGTIVNQIVCKECKNVSERQEDFLDLTVAVKNVSGLEDALWNMYVEEEVFDCDNLYHCGTCDRLVKAAKSAKLRKLPPFLTVSLLRFNFDFVKCERYKETSCYTFPLRINLKPFCEQSELDDLEYIYDLFSVIIHKGGCYGGHYHVYIKDVDHLGNWQFQEEKSKPDVNLKDLQSEEEIDHPLMILKAILLEENNLIPVDQLGQKLLKKIGISWNKKYRKQHGPLRKFLQLHSQIFLLSSDESTVRLLKNSSLQAESDFQRNDQQIFKMLPPESPGLNNSISCPHWFDINDSKVQPIREKDIEQQFQGKESAYMLFYRKSQLQRPPEARANPRYGVPCHLLNEMDAANIELQTKRAECDSANNTFELHLHLGPQYHFFNGALHPVVSQTESVWDLTFDKRKTLGDLRQSIFQLLEFWEGDMVLSVAKLVPAGLHIYQSLGGDELTLCETEIADGEDIFVWNGVEVGGVHIQTGIDCEPLLLNVLHLDTSSDGEKCCQVIESPHVFPANAEVGTVLTALAIPAGVIFINSAGCPGGEGWTAIPKEDMRKTFREQGLRNGSSILIQDSHDDNSLLTKEEKWVTSMNEIDWLHVKNLCQLESEEKQVKISATVNTMVFDIRIKAIKELKLMKELADNSCLRPIDRNGKLLCPVPDSYTLKEAELKMGSSLGLCLGKAPSSSQLFLFFAMGSDVQPGTEMEIVVEETISVRDCLKLMLKKSGLQGDAWHLRKMDWCYEAGEPLCEEDATLKELLICSGDTLLLIEGQLPPLGFLKVPIWWYQLQGPSGHWESHQDQTNCTSSWGRVWRATSSQGASGNEPAQVSLLYLGDIEISEDATLAELKSQAMTLPPFLEFGVPSPAHLRAWTVERKRPGRLLRTDRQPLREYKLGRRIEICLEPLQKGENLGPQDVLLRTQVRIPGERTYAPALDLVWNAAQGGTAGSLRQRVADFYRLPVEKIEIAKYFPEKFEWLPISSWNQQITKRKKKKKQDYLQGAPYYLKDGDTIGVKNLLIDDDDDFSTIRDDTGKEKQKQRALGRRKSQEALHEQSSYILSSAETPARPRAPETSLSIHVGSFR

SEQ ID NO: 27 - DNA, 2396 bp, Homosapiens
cttccgcctactgtatcatagcagcttagaatcccagctgctggctcgggctgcagttctctcatggctcgcacagggtggaccagccccattcccctatgtgtttctctgctgctgacctgtggctttgctgaggcagggaagctgctggtagtgcccatggatgggagtcactggttcaccatgcagtcggtggtggagaaacttatcctcagggggcatgaggtggttgtagtcatgccagaggtgagttggcaactgggaaaatcactgaattgcacagtgaagacttactcaacctcatacactctggaggatctggaccgggaattcatggatttcgccgatgctcaatggaaagcacaagtacgaagtttgttttctctatttctgagttcatccaatggtttttttaacttatttttttcgcattgcaggagtttgtttaatgaccgaaaattagtagaatacttaaaggagagttcttttgatgcggtgtttcttgatccttttgatgcctgtggcttaattgttgccaaatatttctccctcccctctgtggtcttcgccaggggaatagcttgccactatcttgaagaaggtgcacagtgccctgctcctctttcctatgtccccagaattctcttagggttctcagatgccatgactttcaaggagagagtacggaaccacatcatgcacttggaggaacatttattttgccagtatttttccaaaaatgccctagaaatagcctctgaaattctccaaacacctgtcacagcatatgatctctacagccacacatcaatttggttgttgcgaacagactttgttttggactatcccaaacccgtgatgcccaatatgatcttcattggtggtatcaactgccatcagggaaagccattgcctatggaatttgaagcctacattaatgcttctggagaacatggaattgtggttttctctttgggatcaatggtctcagaaattccagagaagaaagctatggcaattgctgatgctttgggcaaaatccctcagacagtcctgtggcggtacactggaacccgaccatcgaatcttgcgaacaacacgatacttgttaagtggctaccccaaaacgatctgcttggtcacccgatgacccgtgcctttatcacccatgctggttcccatggtgtttatgaaagcatatgcaatggcgttcccatggtgatgatgcccttgtttggtgatcagatggacaatgcaaagcgcatggagactaagggagctggagtgaccctgaatgttctggaaatgacttctgaagatttagaaaatgctctaaaagcagtcatcaatgacaaaagttacaaggagaacatcatgcgcctctccagccttcacaaggaccgcccggtggagccgctggacctggccgtgttctgggtggagtttgtgatgaggcacaagggcgcgccacacctgcgccccgcagcccacgacctcacctggtaccagtaccattccttggacgtgattggtttcctcttggccgtcgtgctgacagtggccttcatcacctttaaatgttgtgcttatggctaccggaaatgcttggggaaaaaagggcgagttaagaaagcccacaaatccaagacccattgagaagtgggtgggaaataaggtaaaattttgaaccattccctagtcatttccaaacttgaaaacagaatcagtgttaaattcattttattcttattaaggaaatactttgcataaattaatcagccccagagtgctttaaaaaattctcttaaataaaaataatagactcgctagtcagtaaagatatttgaatatgtatcgtgccccctctggtgtctttgatcaggatgacatgtgccatttttcagaggacgtgcagacaggctggcattctagattacttttcttactctgaaacatggcctgtttgggagtgcgggattcaaaggtggtcccacggctgcccctactgcaaatggcagttttaatcttatcttttggcttctgcagatggttgcaattgatccttaaccaataatggtcagtcctcatctctgtcgtgcttcataggtgccaccttgtgtgtttaaagaagggaagctttgtacctttagagtgtaggtgaaatgaatgaatggcttggagtgcactgagaacagcatatgatttcttgctttggggaaaaagaatgatgctatgaaattggtgggtggtgtatttgagaagataatcattgcttatgtcaaatggagctgaatttgataaaaacccaaaatacagctatgaagtgctgggcaagtttactttttttctgatgtttcctacaactaaaaataaattaataaatttatataaattct

SEQ ID NO: 28 - protein, 530 aa, Homosapiens
MARTGWTSPIPLCVSLLLTCGFAEAGKLLVVPMDGSHWFTMQSVVEKLILRGHEVVVVMPEVSWQLGKSLNCTVKTYSTSYTLEDLDREFMDFADAQWKAQVRSLFSLFLSSSNGFFNLFFSHCRSLFNDRKLVEYLKESSFDAVFLDPFDACGLIVAKYFSLPSVVFARGIACHYLEEGAQCPAPLSYVPRILLGFSDAMTFKERVRNHIMHLEEHLFCQYFSKNALEIASEILQTPVTAYDLYSHTSIWLLRTDFVLDYPKPVMPNMIFIGGINCHQGKPLPMEFEAYINASGEHGIVVFSLGSMVSEIPEKKAMAIADALGKIPQTVLWRYTGTRPSNLANNTILVKWLPQNDLLGHPMTRAFITHAGSHGVYESICNGVPMVMMPLFGDQMDNAKRMETKGAGVTLNVLEMTSEDLENALKAVINDKSYKENIMRLSSLHKDRPVEPLDLAVFWVEFVMRHKGAPHLRPAAHDLTWYQYHSLDVIGFLLAVVLTVAFITFKCCAYGYRKCLGKKGRVKKAHKSKTH

SEQ ID NO: 29 - DNA, 2399 bp, Homosapiens
atagcagcttagaatcccagctgctggctcgggctgcagttctctcatggctcgcgcagggtggaccagccccgttcctttatgtgtgtgtctactgctgacctgtggctttgccgaggcagggaagctgctggtagtgcccatggatgggagtcactggttcaccatgcagtcggtggtggagaaacttatcctcagggggcatgaggtggttgtagtcatgccagaggtgagttggcaactggaaagatcactgaattgcacagtgaagacttactcaacctcgtacactctggaagatcagaaccgggaattcatggttttcgcccatgctcaatggaaagcacaggcacaaagtatattttctctattaatgagttcatccagtggttttcttgacttatttttttcgcattgcaggagtttgtttaatgaccgaaaattagtagaatacttaaaggagagttcttttgatgcagtgtttctggatccttttgatacctgtggcttaattgttgctaaatatttctccctcccctctgtggtcttcaccaggggaatattttgccaccatcttgaagaaggtgcacagtgccctgctcctctttcctatgtccccaatgatctcttagggttctcagatgccatgactttcaaggagagagtatggaaccacatcgtgcacttggaggaccatttattttgccagtatctttttagaaatgccctagaaatagcctctgaaattctccaaacccctgtcacggcatatgatctctacagtcacacatcaatttggttgttgcgaacggactttgttttggactatcccaaacccgtgatgcccaacatgatcttcattggtggtatcaactgtcatcagggaaagccattgcctatggaatttgaagcctacattaatgcttctggagaacatggaattgtggttttctctttgggatcaatggtctcagaaattccagagaagaaagctatggcaattgctgatgctttgggcaaaatccctcagacagtcctgtggcggtacactggaacccgaccatcgaatcttgcgaacaacacgatacttgttaagtggctaccccaaaacgatctgcttggtcacccgatgacccgtgcctttatcacccatgctggttcccatggtgtttatgaaagcatatgcaatggcgttcccatggtgatgatgcccttgtttggtgatcagatggacaatgcaaagcgcatggagactaagggagctggagtgaccctgaatgttctggaaatgacttctgaagatttagaaaatgctctaaaagcagtcatcaatgacaaaagttacaaggagaacatcatgcgcctctccagccttcacaaggaccgcccggtggagccgctggacctggccgtgttctgggtggagtttgtgatgaggcacaagggcgcgccacacctgcgccccgcagcccacgacctcacctggtaccagtaccattccttggacgtgattggtttcctcttggccgtcgtgctgacagtggccttcatcacctttaaatgttgtgcttatggctaccggaaatgcttggggaaaaaagggcgagttaagaaagcccacaaatccaagacccattgagaagtgggtgggaaataaggtaaaattttgaaccattccctagtcatttccaaacttgaaaacagaatcagtgttaaattcattttattcttattaaggaaatactttgcataaattaatcagccccagagtgctttaaaaaattctcttaaataaaaataatagactcgctagtcagtaaagatatttgaatatgtatcgtgccccctctggtgtctttgatcaggatgacatgtgccatttttcagaggacgtgcagacaggctggcattctagattacttttcttactctgaaacatggcctgtttgggagtgcgggattcaaaggtggtcccacggctgcccctactgcaaatggcagttttaatcttatcttttggcttctgcagatggttgcaattgatccttaaccaataatggtcagtcctcatctctgtcgtgcttcataggtgccaccttgtgtgtttaaagaagggaagctttgtacctttagagtgtaggtgaaatgaatgaatggcttggagtgcactgagaacagcatatgatttcttgctttggggaaaaagaatgatgctatgaaattggtgggtggtgtatttgagaagataatcattgcttatgtcaaatggagctgaatttgataaaaacccaaaatacagctatgaagtgctgggcaagtttactttttttctgatgtttcctacaactaaaaataaattaataaatttatataaattctatttaaaaaaaaaaaaaaaa

SEQ ID NO: 30 - protein, 530 aa, Homosapiens
MARAGWTSPVPLCVCLLLTCGFAEAGKLLVVPMDGSHWFTMQSVVEKLILRGHEVVVVMPEVSWQLERSLNCTVKTYSTSYTLEDQNREFMVFAHAQWKAQAQSIFSLLMSSSSGFLDLFFSHCRSLFNDRKLVEYLKESSFDAVFLDPFDTCGLIVAKYFSLPSVVFTRGIFCHHLEEGAQCPAPLSYVPNDLLGFSDAMTFKERVWNHIVHLEDHLFCQYLFRNALEIASEILQTPVTAYDLYSHTSIWLLRTDFVLDYPKPVMPNMIFIGGINCHQGKPLPMEFEAYINASGEHGIVVFSLGSMVSEIPEKKAMAIADALGKIPQTVLWRYTGTRPSNLANNTILVKWLPQNDLLGHPMTRAFITHAGSHGVYESICNGVPMVMMPLFGDQMDNAKRMETKGAGVTLNVLEMTSEDLENALKAVINDKSYKENIMRLSSLHKDRPVEPLDLAVFWVEFVMRHKGAPHLRPAAHDLTWYQYHSLDVIGFLLAVVLTVAFITFKCCAYGYRKCLGKKGRVKKAHKSKTH

SEQ ID NO: 31 - DNA, 2395 bp, Homosapiens
agattcccagctgcttgctctcagctgcagttctctgatggcttgcacagggtggaccagcccccttcctctatgtgtgtgtctgctgctgacctgtggctttgccgaggcagggaagctactggtagtgcccatggatgggagccactggttcaccatgaggtcggtggtggagaaactcattctcagggggcatgaggtggttgtagtcatgccagaggtgagttggcaactgggaagatcactgaattgcacagtgaagacttattcaacttcatataccctggaggatctggaccgggagttcaaggcttttgcccatgctcaatggaaagcacaagtacgaagtatatattctctattaatgggttcatacaatgacatttttgacttatttttttcaaattgcaggagtttgtttaaagacaaaaaattagtagaatacttaaaggagagttcttttgatgcagtgtttctcgatccttttgataactgtggcttaattgttgccaaatatttctccctcccctccgtggtcttcgccaggggaatactttgccactatcttgaagaaggtgcacagtgccctgctcctctttcctatgtccccagaattctcttagggttctcagatgccatgactttcaaggagagagtacggaaccacatcatgcacttggaggaacatttattatgccaccgttttttcaaaaatgccctagaaatagcctctgaaattctccaaacacctgttacggagtatgatctctacagccacacatcaatttggttgttgcgaacggactttgttttggactatcccaaacccgtgatgcccaacatgatcttcattggtggtatcaactgccatcagggaaagccgttgcctatggaatttgaagcctacattaatgcttctggagaacatggaattgtggttttctctttgggatcaatggtctcagaaattccagagaagaaagctatggcaattgctgatgctttgggcaaaatccctcagacagtcctgtggcggtacactggaacccgaccatcgaatcttgcgaacaacacgatacttgttaagtggctaccccaaaacgatctgcttggtcacccgatgacccgtgcctttatcacccatgctggttcccatggtgtttatgaaagcatatgcaatggcgttcccatggtgatgatgcccttgtttggtgatcagatggacaatgcaaagcgcatggagactaagggagctggagtgaccctgaatgttctggaaatgacttctgaagatttagaaaatgctctaaaagcagtcatcaatgacaaaagttacaaggagaacatcatgcgcctctccagccttcacaaggaccgcccggtggagccgctggacctggccgtgttctgggtggagtttgtgatgaggcacaagggcgcgccacacctgcgccccgcagcccacgacctcacctggtaccagtaccattccttggacgtgattggtttcctcttggccgtcgtgctgacagtggccttcatcacctttaaatgttgtgcttatggctaccggaaatgcttggggaaaaaagggcgagttaagaaagcccacaaatccaagacccattgagaagtgggtgggaaataaggtaaaattttgaaccattccctagtcatttccaaacttgaaaacagaatcagtgttaaattcattttattcttattaaggaaatactttgcataaattaatcagccccagagtgctttaaaaaattctcttaaataaaaataatagactcgctagtcagtaaagatatttgaatatgtatcgtgccccctctggtgtctttgatcaggatgacatgtgccatttttcagaggacgtgcagacaggctggcattctagattacttttcttactctgaaacatggcctgtttgggagtgcgggattcaaaggtggtcccacggctgcccctactgcaaatggcagttttaatcttatcttttggcttctgcagatggttgcaattgatccttaaccaataatggtcagtcctcatctctgtcgtgcttcataggtgccaccttgtgtgtttaaagaagggaagctttgtacctttagagtgtaggtgaaatgaatgaatggcttggagtgcactgagaacagcatatgatttcttgctttggggaaaaagaatgatgctatgaaattggtgggtggtgtatttgagaagataatcattgcttatgtcaaatggagctgaatttgataaaaacccaaaatacagctatgaagtgctgggcaagtttactttttttctgatgtttcctacaactaaaaataaattaataaatttatataaattctatttaaaaaaaaaaaaaaaaaaaaa

SEQ ID NO: 32 - protein, 530 aa, Homosapiens
MACTGWTSPLPLCVCLLLTCGFAEAGKLLVVPMDGSHWFTMRSVVEKLILRGHEVVVVMPEVSWQLGRSLNCTVKTYSTSYTLEDLDREFKAFAHAQWKAQVRSIYSLLMGSYNDIFDLFFSNCRSLFKDKKLVEYLKESSFDAVFLDPFDNCGLIVAKYFSLPSVVFARGILCHYLEEGAQCPAPLSYVPRILLGFSDAMTFKERVRNHIMHLEEHLLCHRFFKNALEIASEILQTPVTEYDLYSHTSIWLLRTDFVLDYPKPVMPNMIFIGGINCHQGKPLPMEFEAYINASGEHGIVVFSLGSMVSEIPEKKAMAIADALGKIPQTVLWRYTGTRPSNLANNTILVKWLPQNDLLGHPMTRAFITHAGSHGVYESICNGVPMVMMPLFGDQMDNAKRMETKGAGVTLNVLEMTSEDLENALKAVINDKSYKENIMRLSSLHKDRPVEPLDLAVFWVEFVMRHKGAPHLRPAAHDLTWYQYHSLDVIGFLLAVVLTVAFITFKCCAYGYRKCLGKKGRVKKAHKSKTH

SEQ ID NO: 33 - DNA, 2333 bp, Homosapiens
atggctcgtgcagggtggactggcctccttcccctatatgtgtgtctactgctgacctgtggctttgccaaggcagggaagctgctggtagtgcccatggatgggagccactggttcaccatgcagtcggtggtggagaaactcatcctcagggggcatgaggtggtcgtagtcatgccagaggtgagttggcaactgggaagatcactgaattgcacagtgaagacttactcaacctcatacactctggaggatcaggaccgggagttcatggtttttgccgatgctcgctggacggcaccattgcgaagtgcattttctctattaacaagttcatccaatggtatttttgacttatttttttcaaattgcaggagtttgtttaatgaccgaaaattagtagaatacttaaaggagagttgttttgatgcagtgtttctcgatccttttgatgcctgtggcttaattgttgccaaatatttctccctcccctctgtggtcttcgccaggggaatattttgccactatcttgaagaaggtgcacagtgccctgctcctctttcctatgtccccagacttctcttagggttctcagacgccatgactttcaaggagagagtatggaaccacatcatgcacttggaggaacatttattttgcccctattttttcaaaaatgtcttagaaatagcctctgaaattctccaaacccctgtcacggcatatgatctctacagccacacatcaatttggttgttgcgaactgactttgttttggagtatcccaaacccgtgatgcccaatatgatcttcattggtggtatcaactgtcatcagggaaagccagtgcctatggaatttgaagcctacattaatgcttctggagaacatggaattgtggttttctctttgggatcaatggtctcagaaattccagagaagaaagctatggcaattgctgatgctttgggcaaaatccctcagacagtcctgtggcggtacactggaacccgaccatcgaatcttgcgaacaacacgatacttgttaagtggctaccccaaaacgatctgcttggtcacccgatgacccgtgcctttatcacccatgctggttcccatggtgtttatgaaagcatatgcaatggcgttcccatggtgatgatgcccttgtttggtgatcagatggacaatgcaaagcgcatggagactaagggagctggagtgaccctgaatgttctggaaatgacttctgaagatttagaaaatgctctaaaagcagtcatcaatgacaaaagttacaaggagaacatcatgcgcctctccagccttcacaaggaccgcccggtggagccgctggacctggccgtgttctgggtggagtttgtgatgaggcacaagggcgcgccacacctgcgccccgcagcccacgacctcacctggtaccagtaccattccttggacgtgattggtttcctcttggccgtcgtgctgacagtggccttcatcacctttaaatgttgtgcttatggctaccggaaatgcttggggaaaaaagggcgagttaagaaagcccacaaatccaagacccattgagaagtgggtgggaaataaggtaaaattttgaaccattccctagtcatttccaaacttgaaaacagaatcagtgttaaattcattttattcttattaaggaaatactttgcataaattaatcagccccagagtgctttaaaaaattctcttaaataaaaataatagactcgctagtcagtaaagatatttgaatatgtatcgtgccccctctggtgtctttgatcaggatgacatgtgccatttttcagaggacgtgcagacaggctggcattctagattacttttcttactctgaaacatggcctgtttgggagtgcgggattcaaaggtggtcccacggctgcccctactgcaaatggcagttttaatcttatcttttggcttctgcagatggttgcaattgatccttaaccaataatggtcagtcctcatctctgtcgtgcttcataggtgccaccttgtgtgtttaaagaagggaagctttgtacctttagagtgtaggtgaaatgaatgaatggcttggagtgcactgagaacagcatatgatttcttgctttggggaaaaagaatgatgctatgaaattggtgggtggtgtatttgagaagataatcattgcttatgtcaaatggagctgaatttgataaaaacccaaaatacagctatgaagtgctgggcaagtttactttttttctgatgtttcctacaactaaaaataaattaataaatttatataaattct

SEQ ID NO: 34 - protein, 530 aa, Homosapiens
MARAGWTGLLPLYVCLLLTCGFAKAGKLLVVPMDGSHWFTMQSVVEKLILRGHEVVVVMPEVSWQLGRSLNCTVKTYSTSYTLEDQDREFMVFADARWTAPLRSAFSLLTSSSNGIFDLFFSNCRSLFNDRKLVEYLKESCFDAVFLDPFDACGLIVAKYFSLPSVVFARGIFCHYLEEGAQCPAPLSYVPRLLLGFSDAMTFKERVWNHIMHLEEHLFCPYFFKNVLEIASEILQTPVTAYDLYSHTSIWLLRTDFVLEYPKPVMPNMIFIGGINCHQGKPVPMEFEAYINASGEHGIVVFSLGSMVSEIPEKKAMAIADALGKIPQTVLWRYTGTRPSNLANNTILVKWLPQNDLLGHPMTRAFITHAGSHGVYESICNGVPMVMMPLFGDQMDNAKRMETKGAGVTLNVLEMTSEDLENALKAVINDKSYKENIMRLSSLHKDRPVEPLDLAVFWVEFVMRHKGAPHLRPAAHDLTWYQYHSLDVIGFLLAVVLTVAFITFKCCAYGYRKCLGKKGRVKKAHKSKTH

SEQ ID NO: 35 - DNA, 2435 bp, Homosapiens
gaaaagcagtggtttgtttagggaaaatacctaggagccctgtgatttggagagtgaaaactctttattaccgttgttactttaactctttccaggatggcctgcctccttcgctcatttcagagaatttctgcaggggttttcttcttagcactttggggcatggttgtaggtgacaagctgctggtggtccctcaggacggaagccactggcttagtatgaaggatatagttgaggttctcagtgaccggggtcatgagattgtagtggtggtgcctgaagttaatttgcttttgaaagaatccaaatactacacaagaaaaatctatccagtgccgtatgaccaagaagagctgaagaaccgttaccaatcatttggaaacaatcactttgctgagcgatcattcctaactgctcctcagacagagtacaggaataacatgattgttattggcctgtacttcatcaactgccagagcctcctgcaggacagggacaccctgaacttctttaaggagagcaagtttgatgctcttttcacagacccagccttaccctgtggggtgatcctggctgagtatttgggcctaccatctgtgtacctcttcaggggttttccgtgttccctggagcatacattcagcagaagcccagaccctgtgtcctacattcccaggtgctacacaaagttttcagaccacatgactttttcccaacgagtggccaacttccttgttaatttgttggagccctatctattttattgtctgttttcaaagtatgaagaactcgcatcagctgtcctcaagagagatgtggatataatcaccttatatcagaaggtctctgtttggctgttaagatatgactttgtgcttgaatatcctaggccggtcatgcccaacatggtcttcattggaggtatcaactgtaagaagaggaaagacttgtctcaggaatttgaagcctacattaatgcttctggagaacatggaattgtggttttctctttgggatcaatggtctcagaaattccagagaagaaagctatggcaattgctgatgctttgggcaaaatccctcagacagtcctgtggcggtacactggaacccgaccatcgaatcttgcgaacaacacgatacttgttaagtggctaccccaaaacgatctgcttggtcacccgatgacccgtgcctttatcacccatgctggttcccatggtgtttatgaaagcatatgcaatggcgttcccatggtgatgatgcccttgtttggtgatcagatggacaatgcaaagcgcatggagactaagggagctggagtgaccctgaatgttctggaaatgacttctgaagatttagaaaatgctctaaaagcagtcatcaatgacaaaagttacaaggagaacatcatgcgcctctccagccttcacaaggaccgcccggtggagccgctggacctggccgtgttctgggtggagtttgtgatgaggcacaagggcgcgccacacctgcgccccgcagcccacgacctcacctggtaccagtaccattccttggacgtgattggtttcctcttggccgtcgtgctgacagtggccttcatcacctttaaatgttgtgcttatggctaccggaaatgcttggggaaaaaagggcgagttaagaaagcccacaaatccaagacccattgagaagtgggtgggaaataaggtaaaattttgaaccattccctagtcatttccaaacttgaaaacagaatcagtgttaaattcattttattcttattaaggaaatactttgcataaattaatcagccccagagtgctttaaaaaattctcttaaataaaaataatagactcgctagtcagtaaagatatttgaatatgtatcgtgccccctctggtgtctttgatcaggatgacatgtgccatttttcagaggacgtgcagacaggctggcattctagattacttttcttactctgaaacatggcctgtttgggagtgcgggattcaaaggtggtcccacggctgcccctactgcaaatggcagttttaatcttatcttttggcttctgcagatggttgcaattgatccttaaccaataatggtcagtcctcatctctgtcgtgcttcataggtgccaccttgtgtgtttaaagaagggaagctttgtacctttagagtgtaggtgaaatgaatgaatggcttggagtgcactgagaacagcatatgatttcttgctttggggaaaaagaatgatgctatgaaattggtgggtggtgtatttgagaagataatcattgcttatgtcaaatggagctgaatttgataaaaacccaaaatacagctatgaagtgctgggcaagtttactttttttctgatgtttcctacaactaaaaataaattaataaatttatataaattct

SEQ ID NO: 36 - protein, 532 aa, Homosapiens
MACLLRSFQRISAGVFFLALWGMVVGDKLLVVPQDGSHWLSMKDIVEVLSDRGHEIVVVVPEVNLLLKESKYYTRKIYPVPYDQEELKNRYQSFGNNHFAERSFLTAPQTEYRNNMIVIGLYFINCQSLLQDRDTLNFFKESKFDALFTDPALPCGVILAEYLGLPSVYLFRGFPCSLEHTFSRSPDPVSYIPRCYTKFSDHMTFSQRVANFLVNLLEPYLFYCLFSKYEELASAVLKRDVDIITLYQKVSVWLLRYDFVLEYPRPVMPNMVFIGGINCKKRKDLSQEFEAYINASGEHGIVVFSLGSMVSEIPEKKAMAIADALGKIPQTVLWRYTGTRPSNLANNTILVKWLPQNDLLGHPMTRAFITHAGSHGVYESICNGVPMVMMPLFGDQMDNAKRMETKGAGVTLNVLEMTSEDLENALKAVINDKSYKENIMRLSSLHKDRPVEPLDLAVFWVEFVMRHKGAPHLRPAAHDLTWYQYHSLDVIGFLLAVVLTVAFITFKCCAYGYRKCLGKKGRVKKAHKSKTH

SEQ ID NO: 37 - DNA, 1691 bp, Homosapiens
agaaacctgaagctcaggagaggagtcactcccctggcagatgggtggctgggccagaagcagataccaggctttctgactcctgctctaggattctcaccacgtactggctagacttatacttctcaaatcttaatttcctaaaggccggtcatgcccaacatggtcttcattggaggtatcaactgtaagaagaggaaagacttgtctcaggaatttgaagcctacattaatgcttctggagaacatggaattgtggttttctctttgggatcaatggtctcagaaattccagagaagaaagctatggcaattgctgatgctttgggcaaaatccctcagacagtcctgtggcggtacactggaacccgaccatcgaatcttgcgaacaacacgatacttgttaagtggctaccccaaaacgatctgcttggtcacccgatgacccgtgcctttatcacccatgctggttcccatggtgtttatgaaagcatatgcaatggcgttcccatggtgatgatgcccttgtttggtgatcagatggacaatgcaaagcgcatggagactaagggagctggagtgaccctgaatgttctggaaatgacttctgaagatttagaaaatgctctaaaagcagtcatcaatgacaaaagttacaaggagaacatcatgcgcctctccagccttcacaaggaccgcccggtggagccgctggacctggccgtgttctgggtggagtttgtgatgaggcacaagggcgcgccacacctgcgccccgcagcccacgacctcacctggtaccagtaccattccttggacgtgattggtttcctcttggccgtcgtgctgacagtggccttcatcacctttaaatgttgtgcttatggctaccggaaatgcttggggaaaaaagggcgagttaagaaagcccacaaatccaagacccattgagaagtgggtgggaaataaggtaaaattttgaaccattccctagtcatttccaaacttgaaaacagaatcagtgttaaattcattttattcttattaaggaaatactttgcataaattaatcagccccagagtgctttaaaaaattctcttaaataaaaataatagactcgctagtcagtaaagatatttgaatatgtatcgtgccccctctggtgtctttgatcaggatgacatgtgccatttttcagaggacgtgcagacaggctggcattctagattacttttcttactctgaaacatggcctgtttgggagtgcgggattcaaaggtggtcccacggctgcccctactgcaaatggcagttttaatcttatcttttggcttctgcagatggttgcaattgatccttaaccaataatggtcagtcctcatctctgtcgtgcttcataggtgccaccttgtgtgtttaaagaagggaagctttgtacctttagagtgtaggtgaaatgaatgaatggcttggagtgcactgagaacagcatatgatttcttgctttggggaaaaagaatgatgctatgaaattggtgggtggtgtatttgagaagataatcattgcttatgtcaaatggagctgaatttgataaaaacccaaaatacagctatgaagtgctgggcaagtttactttttttctgatgtttcctacaactaaaaataaattaataaatttatataaattct

SEQ ID NO: 38 - protein, 265 aa, Homosapiens
MPNMVFIGGINCKKRKDLSQEFEAYINASGEHGIVVFSLGSMVSEIPEKKAMAIADALGKIPQTVLWRYTGTRPSNLANNTILVKWLPQNDLLGHPMTRAFITHAGSHGVYESICNGVPMVMMPLFGDQMDNAKRMETKGAGVTLNVLEMTSEDLENALKAVINDKSYKENIMRLSSLHKDRPVEPLDLAVFWVEFVMRHKGAPHLRPAAHDLTWYQYHSLDVIGFLLAVVLTVAFITFKCCAYGYRKCLGKKGRVKKAHKSKTH

SEQ ID NO: 39 - DNA, 2345 bp, Homosapiens
atggccacaggactccaggttcccctgccgcagctggccacaggactgctgcttctcctcagtgtccagccctgggctgagagtgggaaggtgctggtggtgcccactgatggcagccactggctcagcatgcgggaggccttgcgggacctccatgcgagaggccaccaggtggtggtcctcaccctggaggtgaatatgtacatcaaagaagagaactttttcaccctgacaacgtatgccatttcatggacccaggacgaatttgatcgccttttgctgggtcacactcaatcgttctttgaaacagaacatcttctgatgaaattttctagaagaatggcaattatgaacaatatgtctttgatcatacataggtcttgtgtggagctactgcataatgaggccctgatcaggcacctgcatgctacttcctttgatgtggttctaacagacccctttcacctctgcgcggcggtgctggctaagtacctgtcgattcctgctgtgtttttcttgaggaacattccatgtgatttagactttaagggcacacagtgtccaaacccttcctcctatattcctagattactaacgaccaattcagaccacatgacattcctgcaaagggtcaagaacatgctctaccctctggccctgtcctacctttgccatgctgtttctgctccttatgcaagccttgcctctgagctttttcagagagaggtgtcagtggtggatcttgtcagccatgcatctgtgtggctgttccgaggggactttgtgatggattaccccaggccgatcatgcccaacatggtcttcattgggggcatcaactgtgccaacgggaagccactatctcaggaatttgaagcctacattaatgcttctggagaacatggaattgtggttttctctttgggatcaatggtctcagaaattccagagaagaaagctatggcaattgctgatgctttgggcaaaatccctcagacagtcctgtggcggtacactggaacccgaccatcgaatcttgcgaacaacacgatacttgttaagtggctaccccaaaacgatctgcttggtcacccgatgacccgtgcctttatcacccatgctggttcccatggtgtttatgaaagcatatgcaatggcgttcccatggtgatgatgcccttgtttggtgatcagatggacaatgcaaagcgcatggagactaagggagctggagtgaccctgaatgttctggaaatgacttctgaagatttagaaaatgctctaaaagcagtcatcaatgacaaaagttacaaggagaacatcatgcgcctctccagccttcacaaggaccgcccggtggagccgctggacctggccgtgttctgggtggagtttgtgatgaggcacaagggcgcgccacacctgcgccccgcagcccacgacctcacctggtaccagtaccattccttggacgtgattggtttcctcttggccgtcgtgctgacagtggccttcatcacctttaaatgttgtgcttatggctaccggaaatgcttggggaaaaaagggcgagttaagaaagcccacaaatccaagacccattgagaagtgggtgggaaataaggtaaaattttgaaccattccctagtcatttccaaacttgaaaacagaatcagtgttaaattcattttattcttattaaggaaatactttgcataaattaatcagccccagagtgctttaaaaaattctcttaaataaaaataatagactcgctagtcagtaaagatatttgaatatgtatcgtgccccctctggtgtctttgatcaggatgacatgtgccatttttcagaggacgtgcagacaggctggcattctagattacttttcttactctgaaacatggcctgtttgggagtgcgggattcaaaggtggtcccacggctgcccctactgcaaatggcagttttaatcttatcttttggcttctgcagatggttgcaattgatccttaaccaataatggtcagtcctcatctctgtcgtgcttcataggtgccaccttgtgtgtttaaagaagggaagctttgtacctttagagtgtaggtgaaatgaatgaatggcttggagtgcactgagaacagcatatgatttcttgctttggggaaaaagaatgatgctatgaaattggtgggtggtgtatttgagaagataatcattgcttatgtcaaatggagctgaatttgataaaaacccaaaatacagctatgaagtgctgggcaagtttactttttttctgatgtttcctacaactaaaaataaattaataaatttatataaattct

SEQ ID NO: 40 - protein, 534 aa, Homosapiens
MATGLQVPLPQLATGLLLLLSVQPWAESGKVLVVPTDGSHWLSMREALRDLHARGHQVVVLTLEVNMYIKEENFFTLTTYAISWTQDEFDRLLLGHTQSFFETEHLLMKFSRRMAIMNNMSLIIHRSCVELLHNEALIRHLHATSFDVVLTDPFHLCAAVLAKYLSIPAVFFLRNIPCDLDFKGTQCPNPSSYIPRLLTTNSDHMTFLQRVKNMLYPLALSYLCHAVSAPYASLASELFQREVSVVDLVSHASVWLFRGDFVMDYPRPIMPNMVFIGGINCANGKPLSQEFEAYINASGEHGIVVFSLGSMVSEIPEKKAMAIADALGKIPQTVLWRYTGTRPSNLANNTILVKWLPQNDLLGHPMTRAFITHAGSHGVYESICNGVPMVMMPLFGDQMDNAKRMETKGAGVTLNVLEMTSEDLENALKAVINDKSYKENIMRLSSLHKDRPVEPLDLAVFWVEFVMRHKGAPHLRPAAHDLTWYQYHSLDVIGFLLAVVLTVAFITFKCCAYGYRKCLGKKGRVKKAHKSKTH

SEQ ID NO: 41 - DNA, 2374 bp, Homosapiens
acagtcagctgtcggtggcttctgctgagatggccagaggactccaggttcccctgccgcggctggccacaggactgctgctcctcctcagtgtccagccctgggctgagagtggaaaggtgttggtggtgcccactgatggcagcccctggctcagcatgcgggaggccttgcgggagctccatgccagaggccaccaggcggtggtcctcaccccagaggtgaatatgcacatcaaagaagagaaatttttcaccctgacagcctatgctgttccatggacccagaaggaatttgatcgcgttacgctgggctacactcaagggttctttgaaacagaacatcttctgaagagatattctagaagtatggcaattatgaacaatgtatctttggcccttcataggtgttgtgtggagctactgcataatgaggccctgatcaggcacctgaatgctacttcctttgatgtggttttaacagaccccgttaacctctgtggggcggtgctggctaagtacctgtcgattcctgctgtgtttttttggaggtacattccatgtgacttagactttaagggcacacagtgtccaaatccttcctcctatattcctaagttactaacgaccaattcagaccacatgacattcctgcaaagggtcaagaacatgctctaccctctggccctgtcctacatttgccatactttttctgccccttatgcaagtcttgcctctgagctttttcagagagaggtgtcagtggtggatcttgtcagctatgcatccgtgtggctgttccgaggggactttgtgatggactaccccaggccgatcatgcccaacatggtcttcattgggggcatcaactgtgccaacgggaagccactatctcaggaatttgaagcctacattaatgcttctggagaacatggaattgtggttttctctttgggatcaatggtctcagaaattccagagaagaaagctatggcaattgctgatgctttgggcaaaatccctcagacagtcctgtggcggtacactggaacccgaccatcgaatcttgcgaacaacacgatacttgttaagtggctaccccaaaacgatctgcttggtcacccgatgacccgtgcctttatcacccatgctggttcccatggtgtttatgaaagcatatgcaatggcgttcccatggtgatgatgcccttgtttggtgatcagatggacaatgcaaagcgcatggagactaagggagctggagtgaccctgaatgttctggaaatgacttctgaagatttagaaaatgctctaaaagcagtcatcaatgacaaaagttacaaggagaacatcatgcgcctctccagccttcacaaggaccgcccggtggagccgctggacctggccgtgttctgggtggagtttgtgatgaggcacaagggcgcgccacacctgcgccccgcagcccacgacctcacctggtaccagtaccattccttggacgtgattggtttcctcttggccgtcgtgctgacagtggccttcatcacctttaaatgttgtgcttatggctaccggaaatgcttggggaaaaaagggcgagttaagaaagcccacaaatccaagacccattgagaagtgggtgggaaataaggtaaaattttgaaccattccctagtcatttccaaacttgaaaacagaatcagtgttaaattcattttattcttattaaggaaatactttgcataaattaatcagccccagagtgctttaaaaaattctcttaaataaaaataatagactcgctagtcagtaaagatatttgaatatgtatcgtgccccctctggtgtctttgatcaggatgacatgtgccatttttcagaggacgtgcagacaggctggcattctagattacttttcttactctgaaacatggcctgtttgggagtgcgggattcaaaggtggtcccacggctgcccctactgcaaatggcagttttaatcttatcttttggcttctgcagatggttgcaattgatccttaaccaataatggtcagtcctcatctctgtcgtgcttcataggtgccaccttgtgtgtttaaagaagggaagctttgtacctttagagtgtaggtgaaatgaatgaatggcttggagtgcactgagaacagcatatgatttcttgctttggggaaaaagaatgatgctatgaaattggtgggtggtgtatttgagaagataatcattgcttatgtcaaatggagctgaatttgataaaaacccaaaatacagctatgaagtgctgggcaagtttactttttttctgatgtttcctacaactaaaaataaattaataaatttatataaattct

SEQ ID NO: 42 - protein, 534 aa, Homosapiens
MARGLQVPLPRLATGLLLLLSVQPWAESGKVLVVPTDGSPWLSMREALRELHARGHQAVVLTPEVNMHIKEEKFFTLTAYAVPWTQKEFDRVTLGYTQGFFETEHLLKRYSRSMAIMNNVSLALHRCCVELLHNEALIRHLNATSFDVVLTDPVNLCGAVLAKYLSIPAVFFWRYIPCDLDFKGTQCPNPSSYIPKLLTTNSDHMTFLQRVKNMLYPLALSYICHTFSAPYASLASELFQREVSVVDLVSYASVWLFRGDFVMDYPRPIMPNMVFIGGINCANGKPLSQEFEAYINASGEHGIVVFSLGSMVSEIPEKKAMAIADALGKIPQTVLWRYTGTRPSNLANNTILVKWLPQNDLLGHPMTRAFITHAGSHGVYESICNGVPMVMMPLFGDQMDNAKRMETKGAGVTLNVLEMTSEDLENALKAVINDKSYKENIMRLSSLHKDRPVEPLDLAVFWVEFVMRHKGAPHLRPAAHDLTWYQYHSLDVIGFLLAVVLTVAFITFKCCAYGYRKCLGKKGRVKKAHKSKTH

SEQ ID NO: 43 - DNA, 2345 bp, Homosapiens
atggccacaggactccaggttcccctgccgtggctggccacaggactgctgcttctcctcagtgtccagccctgggctgagagtggaaaggtgttggtggtgcccattgatggcagccactggctcagcatgcgggaggtcttgcgggagctccatgccagaggccaccaggcagtggtcctcaccccagaggtgaatatgcacatcaaagaagagaactttttcaccctgacaacctatgccatttcgtggacccaggatgaatttgatcgccatgtgctgggccacactcaactgtactttgaaacagaacattttctgaagaaatttttcagaagtatggcaatgttgaacaatatgtctttggtctatcataggtcttgtgtggagctactacataatgaggccctgatcaggcacctgaatgctacttcctttgatgtggttttaacagaccccgttaacctctgcgcggcagtgctggctaagtacctgtcgattcctactgtgttttttttgaggaacattccatgtgatttagactttaagggcacacagtgtccaaacccttcctcctatattcctagattactaacaaccaattcagaccacatgacattcatgcaaagggtcaagaacatgctctaccctctggccctgtcctacatttgccatgctttttctgctccttatgcaagccttgcctctgagctttttcagagagaggtgtcagtggtggatattctcagtcatgcatctgtgtggctgttccgaggggactttgtgatggactaccccaggccaatcatgcccaacatggtcttcattgggggcatcaactgtgccaacaggaagccactatctcaggaatttgaagcctacattaatgcttctggagaacatggaattgtggttttctctttgggatcaatggtctcagaaattccagagaagaaagctatggcaattgctgatgctttgggcaaaatccctcagacagtcctgtggcggtacactggaacccgaccatcgaatcttgcgaacaacacgatacttgttaagtggctaccccaaaacgatctgcttggtcacccgatgacccgtgcctttatcacccatgctggttcccatggtgtttatgaaagcatatgcaatggcgttcccatggtgatgatgcccttgtttggtgatcagatggacaatgcaaagcgcatggagactaagggagctggagtgaccctgaatgttctggaaatgacttctgaagatttagaaaatgctctaaaagcagtcatcaatgacaaaagttacaaggagaacatcatgcgcctctccagccttcacaaggaccgcccggtggagccgctggacctggccgtgttctgggtggagtttgtgatgaggcacaagggcgcgccacacctgcgccccgcagcccacgacctcacctggtaccagtaccattccttggacgtgattggtttcctcttggccgtcgtgctgacagtggccttcatcacctttaaatgttgtgcttatggctaccggaaatgcttggggaaaaaagggcgagttaagaaagcccacaaatccaagacccattgagaagtgggtgggaaataaggtaaaattttgaaccattccctagtcatttccaaacttgaaaacagaatcagtgttaaattcattttattcttattaaggaaatactttgcataaattaatcagccccagagtgctttaaaaaattctcttaaataaaaataatagactcgctagtcagtaaagatatttgaatatgtatcgtgccccctctggtgtctttgatcaggatgacatgtgccatttttcagaggacgtgcagacaggctggcattctagattacttttcttactctgaaacatggcctgtttgggagtgcgggattcaaaggtggtcccacggctgcccctactgcaaatggcagttttaatcttatcttttggcttctgcagatggttgcaattgatccttaaccaataatggtcagtcctcatctctgtcgtgcttcataggtgccaccttgtgtgtttaaagaagggaagctttgtacctttagagtgtaggtgaaatgaatgaatggcttggagtgcactgagaacagcatatgatttcttgctttggggaaaaagaatgatgctatgaaattggtgggtggtgtatttgagaagataatcattgcttatgtcaaatggagctgaatttgataaaaacccaaaatacagctatgaagtgctgggcaagtttactttttttctgatgtttcctacaactaaaaataaattaataaatttatataaattct

SEQ ID NO: 44 - protein, 534 aa, Homosapiens
MATGLQVPLPWLATGLLLLLSVQPWAESGKVLVVPIDGSHWLSMREVLRELHARGHQAVVLTPEVNMHIKEENFFTLTTYAISWTQDEFDRHVLGHTQLYFETEHFLKKFFRSMAMLNNMSLVYHRSCVELLHNEALIRHLNATSFDVVLTDPVNLCAAVLAKYLSIPTVFFLRNIPCDLDFKGTQCPNPSSYIPRLLTTNSDHMTFMQRVKNMLYPLALSYICHAFSAPYASLASELFQREVSVVDILSHASVWLFRGDFVMDYPRPIMPNMVFIGGINCANRKPLSQEFEAYINASGEHGIVVFSLGSMVSEIPEKKAMAIADALGKIPQTVLWRYTGTRPSNLANNTILVKWLPQNDLLGHPMTRAFITHAGSHGVYESICNGVPMVMMPLFGDQMDNAKRMETKGAGVTLNVLEMTSEDLENALKAVINDKSYKENIMRLSSLHKDRPVEPLDLAVFWVEFVMRHKGAPHLRPAAHDLTWYQYHSLDVIGFLLAVVLTVAFITFKCCAYGYRKCLGKKGRVKKAHKSKTH

SEQ ID NO: 45 - DNA, 2357 bp, Homosapiens
aggagcaaaggcgccatggctgtggagtcccagggcggacgcccacttgtcctgggcctgctgctgtgtgtgctgggcccagtggtgtcccatgctgggaagatactgttgatcccagtggatggcagccactggctgagcatgcttggggccatccagcagctgcagcagaggggacatgaaatagttgtcctagcacctgacgcctcgttgtacatcagagacggagcattttacaccttgaagacgtaccctgtgccattccaaagggaggatgtgaaagagtcttttgttagtctcgggcataatgtttttgagaatgattctttcctgcagcgtgtgatcaaaacatacaagaaaataaaaaaggactctgctatgcttttgtctggctgttcccacttactgcacaacaaggagctcatggcctccctggcagaaagcagctttgatgtcatgctgacggaccctttccttccttgcagccccatcgtggcccagtacctgtctctgcccactgtattcttcttgcatgcactgccatgcagcctggaatttgaggctacccagtgccccaacccattctcctacgtgcccaggcctctctcctctcattcagatcacatgaccttcctgcagcgggtgaagaacatgctcattgccttttcacagaactttctgtgcgacgtggtttattccccgtatgcaacccttgcctcagaattccttcagagagaggtgactgtccaggacctattgagctctgcatctgtctggctgtttagaagtgactttgtgaaggattaccctaggcccatcatgcccaatatggtttttgttggtggaatcaactgccttcaccaaaatccactatcccaggaatttgaagcctacattaatgcttctggagaacatggaattgtggttttctctttgggatcaatggtctcagaaattccagagaagaaagctatggcaattgctgatgctttgggcaaaatccctcagacagtcctgtggcggtacactggaacccgaccatcgaatcttgcgaacaacacgatacttgttaagtggctaccccaaaacgatctgcttggtcacccgatgacccgtgcctttatcacccatgctggttcccatggtgtttatgaaagcatatgcaatggcgttcccatggtgatgatgcccttgtttggtgatcagatggacaatgcaaagcgcatggagactaagggagctggagtgaccctgaatgttctggaaatgacttctgaagatttagaaaatgctctaaaagcagtcatcaatgacaaaagttacaaggagaacatcatgcgcctctccagccttcacaaggaccgcccggtggagccgctggacctggccgtgttctgggtggagtttgtgatgaggcacaagggcgcgccacacctgcgccccgcagcccacgacctcacctggtaccagtaccattccttggacgtgattggtttcctcttggccgtcgtgctgacagtggccttcatcacctttaaatgttgtgcttatggctaccggaaatgcttggggaaaaaagggcgagttaagaaagcccacaaatccaagacccattgagaagtgggtgggaaataaggtaaaattttgaaccattccctagtcatttccaaacttgaaaacagaatcagtgttaaattcattttattcttattaaggaaatactttgcataaattaatcagccccagagtgctttaaaaaattctcttaaataaaaataatagactcgctagtcagtaaagatatttgaatatgtatcgtgccccctctggtgtctttgatcaggatgacatgtgccatttttcagaggacgtgcagacaggctggcattctagattacttttcttactctgaaacatggcctgtttgggagtgcgggattcaaaggtggtcccacggctgcccctactgcaaatggcagttttaatcttatcttttggcttctgcagatggttgcaattgatccttaaccaataatggtcagtcctcatctctgtcgtgcttcataggtgccaccttgtgtgtttaaagaagggaagctttgtacctttagagtgtaggtgaaatgaatgaatggcttggagtgcactgagaacagcatatgatttcttgctttggggaaaaagaatgatgctatgaaattggtgggtggtgtatttgagaagataatcattgcttatgtcaaatggagctgaatttgataaaaacccaaaatacagctatgaagtgctgggcaagtttactttttttctgatgtttcctacaactaaaaataaattaataaatttatataaattct

SEQ ID NO: 46 - protein, 533 aa, Homosapiens
MAVESQGGRPLVLGLLLCVLGPVVSHAGKILLIPVDGSHWLSMLGAIQQLQQRGHEIVVLAPDASLYIRDGAFYTLKTYPVPFQREDVKESFVSLGHNVFENDSFLQRVIKTYKKIKKDSAMLLSGCSHLLHNKELMASLAESSFDVMLTDPFLPCSPIVAQYLSLPTVFFLHALPCSLEFEATQCPNPFSYVPRPLSSHSDHMTFLQRVKNMLIAFSQNFLCDVVYSPYATLASEFLQREVTVQDLLSSASVWLFRSDFVKDYPRPIMPNMVFVGGINCLHQNPLSQEFEAYINASGEHGIVVFSLGSMVSEIPEKKAMAIADALGKIPQTVLWRYTGTRPSNLANNTILVKWLPQNDLLGHPMTRAFITHAGSHGVYESICNGVPMVMMPLFGDQMDNAKRMETKGAGVTLNVLEMTSEDLENALKAVINDKSYKENIMRLSSLHKDRPVEPLDLAVFWVEFVMRHKGAPHLRPAAHDLTWYQYHSLDVIGFLLAVVLTVAFITFKCCAYGYRKCLGKKGRVKKAHKSKTH

SEQ ID NO: 47 - DNA, 1279 bp, Homosapiens
gccgtagtcccagttgagaagctgtgcccccttgggtgttttggaggttcagggtgggtgctgaaaagccctgagggagagcagaaggctcgggggcctgtctagggcatggcatcccacgtgggtgtcagcacggccgcagaagaaccacttctctggcccacccatgcctgctaggccatgcttcttcagaagtggccacaactctcctgacgtctccagagccggtcattccacccagggggacttcagctgccactggacacttcaattgtacgctgcgaccagttgccaggaaggagagggctggcaagagagccgcggcagccgtggcagggtgtaggggacggtggacggccagggcccccccctctctctctttctctctctctctcttgcttggtttctgtaatgaggaagttctccgcagctcagtttcctttccctcactgagcgcctgaaacaggaagtcagtcagttaagctggtggcagcagccgaggccaccaagaggcaacgggcggcaggttgcagtggaggggcctccgctcccctcggtggtgtgtgggtcctgggggtgcctgccggcccggccgaggaggcccacgcccaccatggtcccctgctggaaccatggcaacatcacccgctccaaggcggaggagctgctttccaggacaggcaaggacgggagcttcctcgtgcgtgccagcgagtccatctcccgggcatacgcgctctgcgtgctgtatcggaattgcgtttacacttacagaattctgcccaatgaagatgataaattcactgttcaggcatccgaaggcgtctccatgaggttcttcaccaagctggaccagctcatcgagttttacaagaaggaaaacatggggctggtgacccatctgcaataccctgtgccgctggaggaagaggacacaggcgacgaccctgaggaggacacagaaagtgtcgtgtctccacccgagctgcccccaagaaacatcccgctgactgccagctcctgtgaggccaaggaggttcctttttcaaacgagaatccccgagcgaccgagaccagccggccgagcctctccgagacattgttccagcgactgcaaagcatggacaccagtgggcttccagaagagcatcttaaggccatccaagattatttaagcactcagctcgcccaggactctgaatttgtgaagacagggtccagcagtcttcctcacctgaagaaactgaccacactgctctgcaaggagctctatgggtaa

SEQ ID NO: 48 - protein, 221 aa, Homosapiens
MVPCWNHGNITRSKAEELLSRTGKDGSFLVRASESISRAYALCVLYRNCVYTYRILPNEDDKFTVQASEGVSMRFFTKLDQLIEFYKKENMGLVTHLQYPVPLEEEDTGDDPEEDTESVVSPPELPPRNIPLTASSCEAKEVPFSNENPRATETSRPSLSETLFQRLQSMDTSGLPEEHLKAIQDYLSTQLAQDSEFVKTGSSSLPHLKKLTTLLCKELYG

SEQ ID NO: 49 - DNA, 5992 bp, Homosapiens
ggcgacgtgtcggccatcttgtgttgttgaggctgaggactgactggggttctgagactccctgtcccggaccgcagattatagtgggaccagtctcattaggttgaatctacagcctatgttggtgttaacccaggtctcttagagcgttaaaaggatctgaacaaagtctgctcaaatctcctgctgtgaaccagcagaatttttgaacagagaccacgtctccacctcctgggctccaacgattctcccatcttggcctcccaaagcgctggatttacaggtttcttcacatataaaaatctattgtaaaaatacggaaaagaatggcagcggaaacgcagacactgaactttgggcctgaatggctccgagctctgtccagtggtgggagtattacatcccctcctctttctccagcattgccgaagtataaattagcagattatcgttacggcagagaagaaatgttagcacttttccttaaagacaacaagataccttcagaccttctggataaagaatttctgcctatcctccaggaggaaccccttccaccattggctctggtaccctttacagaagaagaacagagaaacttttccatgtctgtaaatagtgctgctgtcctgcgattgacaggacgaggaggaggaggaacagtggtgggggctcctagaggtcgaagttcttcaagagggcgaggcagaggcagaggtgaatgtggtttctaccaaagaagttttgatgaagtagagggtgtttttggtcgaggaggtggcagagaaatgcatagatcgcagagctgggaggaaaggggtgacagacgttttgaaaaaccaggacgaaaagatgtagggagaccaaattttgaggaaggtggaccaacatcagtagggagaaagcatgaatttatacgctcagaaagtgaaaattggcgcatctttagagaggaacaaaatggagaagatgaagatggaggttggcgactagctggatcaaggagggatggagagaggtggcgacctcacagtcctgatggccctcgttctgcaggctggcgggaacacatggaacgacgtcggaggtttgagtttgattttcgagatagagatgatgaacggggttaccgaagggttcgctctggcagtgggagcatagatgatgacagggatagcttgcccgaatggtgcttagaggatgctgaagaagaaatgggtacatttgactcatctggagcattcctttctctaaaaaaagtacagaaagagcctattccagaagagcaggagatggacttccggcctgtggacgaaggggaggagtgctctgactctgagggtagccataatgaagaggccaaagaacccgataagacaaataagaaagaaggagagaaaacagatagagtaggagttgaagctagtgaggaaactccccagacctcatcatcatctgctagaccaggtactccttcagaccatcagtctcaggaagcatcacagtttgagaggaaagatgaaccaaaaactgagcaaacggaaaaagctgaagaggagactcggatggaaaatagtctaccagccaaagtgcccagcagaggggatgaaatggttgctgatgtccagcagcccctgtcgcagattccttcagatacagcctctcctcttctcatacttccacctcctgttcccaatcctagtcctactctccggccagttgaaacaccagttgtaggtgctcctggtatgggcagtgtttccacagaacctgatgatgaagaaggtctcaaacatttggagcagcaagctgagaaaatggtggcttatctccaagacagtgcactagatgatgaaagattggcatcaaaactgcaagagcacagagctaaaggagtgtcgattccattgatgcatgaagcaatgcagaagtggtattacaaagatcctcagggagaaattcaaggtcccttcaataatcaggagatggcagaatggtttcaggcgggctattttactatgtctttattggtgaagagagcgtgtgatgaaagcttccaacctcttggcgatatcatgaaaatgtggggaagggttcccttttctccaggtccagctccccctcctcatatgggagagctggaccaggaacgactgaccaggcagcaagaactcacagccttataccagatgcagcacctgcagtaccagcagtttttaatacaacaacaatatgcacaggttttggcccaacagcagaaagcagcactgtcttcccagcagcagcagcagttggcacttcttcttcaacagtttcagaccttgaagatgagaatatctgatcagaacatcattccctcagtaactaggtctgtgtccgtgccagatactggctctatctgggagcttcagccaacagcttcacagcctacagtttgggaaggtggtagtgtatgggatcttcctctggacaccacgacaccaggccctgccctggaacagcttcagcagctagagaaggccaaagctgcaaagctagagcaagagagaagagaggcagaaatgagggcaaaacgggaagaggaagagcgaaagaggcaggaagaactccgaagacaacaggaggaaattcttcggcgacagcaggaagaagaaaggaaaaggcgagaggaagaagaacttgcccgaaggaaacaggaagaggctctgcgtcgccagcgggagcaagaaattgcattaaggcgacagcgagaagaggaagaaagacagcagcaagaagaagctcttagaagactggaagagaggagaagagaagaggaagaaaggcggaagcaggaagaattgttacgcaaacaggaagaggaggctgcaaaatgggcccgggaagaagaagaagcccagcgtcgattagaggagaaccggctgcggatggaagaggaggcagccagactccggcatgaggaagaagaacggaagagaaaggagctggaggtccagcggcagaaggagttaatgcgccagaggcagcagcagcaagaggctctccggaggttgcagcagcagcagcagcaacaacagctggcgcagatgaagcttccttcttcttcaacgtggggccagcagtccaatacaacagcatgtcagtcccaggccacgctgtcgttggctgaaatccaaaaactagaggaagaacgagaacggcagcttcgagaagagcaaaggcgccagcagagggagttgatgaaagctcttcagcagcagcagcaacagcaacagcagaaactctcaggttgggggaatgtcagcaaaccttcaggtaccacgaaatctcttctggagatccagcaggaagaggccaggcaaatgcaaaagcagcagcagcagcagcagcaacaccagcaaccaaacagagctcgtaacaatacgcattccaacctgcacaccagcattgggaattctgtttggggctctataaatactggtcctcctaaccagtgggcatctgacctagtcagtagtatttggagtaatgctgacactaaaaactccaacatgggattctgggatgatgcagtgaaagaggtgggacctaggaattcaacaaataaaaataaaaacaacgccagtctcagtaaatctgtaggtgtgtctaaccggcagaataagaaagtagaagaagaagaaaagttgctgaagctctttcagggagtaaataaagcccaagatggatttacgcagtggtgtgaacagatgcttcatgcccttaatacggcaaataacttggatgttcccacatttgtttctttcctgaaagaagtagaatctccttatgaggtccatgattatatcagggcctatttaggagatacttctgaggccaaggagtttgccaagcagttccttgagcgccgtgccaaacagaaagccaaccagcagcgtcagcagcagcagctgccacagcagcagcagcagcagccgccacagcagccgccacagcagccacaacagcaggactctgtgtgggggatgaaccacagtacactccattcagtatttcagaccaatcaaagcaacaaccaacaatccaattttgaggctgtgcagagtggcaagaagaagaaaaagcagaagatggtccgagcagatcccagtttattaggattttcagtcaatgcatcatcggagcgactcaacatgggtgaaatcgagacgttggatgactactgagcacctgccagtggactggccatccctctcctgtctgccgactatggagtctccacctttggacacaacacttactcaccatttactctttatcactctgcaacaaatcacagaaccgatcatctcaggctttttcttctggccctttgtgtccaagattctttaatccatttttgttggtgaacatctcagactatagataagtggactggaccctgtgtcttgggggtggcagttgggattactccccaacaaggctgattttaggcagcatgtgttcactgtgctgtgatttcatctactgtctcccagaaagtgtgttgggatcggccattagcagcttgctttctcttgtcactttttttcttctattttgttttttcttcttctttttccccccatcagggcaaatggtctaactggtgcaatcatgaagagagttaatggttaacagacattggccaataacaaaacaccccatggactgtgactcgagtatccaacaggcagtcagagctctcccggtctgaaagttgcattgccactgctaactttgggattgcatcagagaggccctgagtggggttgagatgaggttggtttggtttgatgttacacactcctcacctgttctttctgagtgtcctttctctgaaaggatttatgtttttcttcgttagatagtgacttctgagcaagctgatctcccctggcatgctccaacctgattggacaaaggaagctctatggcctgggagagagactattcttaatttttctttcttacaaaaactgatttttcccataaatatttttacttcagaggactaggaccattttgttttgggcccttctgctgaaaatttgtctcgtttaagaggcagctagaatctttaccatatgtatgaatttgtataatttcatttttggatagggataaacttttgcttctgataaaagcctggaatttcatctggtcctcagagcattgcgtgtgtgtcttgctgtagcccggaaaaggttttgtgtaaagattctgggatggcaagttgtttgccttttctgaaaagagaacatacagaacctgtccatctttaagaccttcatccatggaatctactatacaggaggatgcagtgggctggaggggatgggcgaaaatgggagcaggaagcctggcctggcttctggtcatggcctcctaaaaccttaaacttcaagtagaaatgtactcaagccctatttataaacaaatacttttcctgcctccaccaaacccctacagaacatcacctggaattgccactcacactgggttggagtcattgggcagctgtgcctgtgcgagaggtgctgtggtctgggcagcccctggaaaagcacctttgctgcctgtcattgttgcctgaagaaggctggagttgctctgagagcagtttgggtttggagtattatatttggcttctatttttattattttggatcaccattctccctatcccttcttgcctccctcccttctaaacatgtgtaataactatacagagactgctacaaaattgtatatagtttttggatcaaatagcatgaggggagaggaaaccattaaaagttggggctcctactctcctttgctttgtaaattcaaaagttgggggtgggtaagagggatagttaaaatgtttacaaaactttaggctccctcggaacttttgccagtgtggaggaaaataaaaaagaacttaaataaaatctgattgtattct

SEQ ID NO: 50 - protein, 1299 aa, Homosapiens; identical to SEQ ID NO: 2

SEQ ID NO: 51 - DNA, 7943 bp, Homosapiens
ggcgacgtgtcggccatcttgtgttgttgaggctgaggactgactggggttctgagactccctgtcccggaccgcagattatagtgggaccagtctcattaggttgaatctacagcctatgttggtgttaacccaggtctcttagagcgttaaaaggatctgaacaaagtctgctcaaatctcctgctgtgaaccagcagaatttttgaacagagaccacgtctccacctcctgggctccaacgattctcccatcttggcctcccaaagcgctggatttacaggtttcttcacatataaaaatctattgtaaaaatacggaaaagaatggcagcggaaacgcagacactgaactttgggcctgaatggctccgagctctgtccagtggtgggagtattacatcccctcctctttctccagcattgccgaagtataaattagcagattatcgttacggcagagaagaaatgttagcacttttccttaaagacaacaagataccttcagaccttctggataaagaatttctgcctatcctccaggaggaaccccttccaccattggctctggtaccctttacagaagaagaacagagaaacttttccatgtctgtaaatagtgctgctgtcctgcgattgacaggacgaggaggaggaggaacagtggtgggggctcctagaggtcgaagttcttcaagagggcgaggcagaggcagaggtgaatgtggtttctaccaaagaagttttgatgaagtagagggtgtttttggtcgaggaggtggcagagaaatgcatagatcgcagagctgggaggaaaggggtgacagacgttttgaaaaaccaggacgaaaagatgtagggagaccaaattttgaggaaggtggaccaacatcagtagggagaaagcatgaatttatacgctcagaaagtgaaaattggcgcatctttagagaggaacaaaatggagaagatgaagatggaggttggcgactagctggatcaaggagggatggagagaggtggcgacctcacagtcctgatggccctcgttctgcaggctggcgggaacacatggaacgacgtcggaggtttgagtttgattttcgagatagagatgatgaacggggttaccgaagggttcgctctggcagtgggagcatagatgatgacagggatagcttgcccgaatggtgcttagaggatgctgaagaagaaatgggtacatttgactcatctggagcattcctttctctaaaaaaagtacagaaagagcctattccagaagagcaggagatggacttccggcctgtggacgaaggggaggagtgctctgactctgagggtagccataatgaagaggccaaagaacccgataagacaaataagaaagaaggagagaaaacagatagagtaggagttgaagctagtgaggaaactccccagacctcatcatcatctgctagaccaggtactccttcagaccatcagtctcaggaagcatcacagtttgagaggaaagatgaaccaaaaactgagcaaacggaaaaagctgaagaggagactcggatggaaaatagtctaccagccaaagtgcccagcagaggggatgaaatggttgctgatgtccagcagcccctgtcgcagattccttcagatacagcctctcctcttctcatacttccacctcctgttcccaatcctagtcctactctccggccagttgaaacaccagttgtaggtgctcctggtatgggcagtgtttccacagaacctgatgatgaagaaggtctcaaacatttggagcagcaagctgagaaaatggtggcttatctccaagacagtgcactagatgatgaaagattggcatcaaaactgcaagagcacagagctaaaggagtgtcgattccattgatgcatgaagcaatgcagaagtggtattacaaagatcctcagggagaaattcaaggtcccttcaataatcaggagatggcagaatggtttcaggcgggctattttactatgtctttattggtgaagagagcgtgtgatgaaagcttccaacctcttggcgatatcatgaaaatgtggggaagggttcccttttctccaggtccagctccccctcctcatatgggagagctggaccaggaacgactgaccaggcagcaagaactcacagccttataccagatgcagcacctgcagtaccagcagtttttaatacaacaacaatatgcacaggttttggcccaacagcagaaagcagcactgtcttcccagcagcagcagcagttggcacttcttcttcaacagtttcagaccttgaagatgagaatatctgatcagaacatcattccctcagtaactaggtctgtgtccgtgccagatactggctctatctgggagcttcagccaacagcttcacagcctacagtttgggaaggtggtagtgtatgggatcttcctctggacaccacgacaccaggccctgccctggaacagcttcagcagctagagaaggccaaagctgcaaagctagagcaagagagaagagaggcagaaatgagggcaaaacgggaagaggaagagcgaaagaggcaggaagaactccgaagacaacaggaggaaattcttcggcgacagcaggaagaagaaaggaaaaggcgagaggaagaagaacttgcccgaaggaaacaggaagaggctctgcgtcgccagcgggagcaagaaattgcattaaggcgacagcgagaagaggaagaaagacagcagcaagaagaagctcttagaagactggaagagaggagaagagaagaggaagaaaggcggaagcaggaagaattgttacgcaaacaggaagaggaggctgcaaaatgggcccgggaagaagaagaagcccagcgtcgattagaggagaaccggctgcggatggaagaggaggcagccagactccggcatgaggaagaagaacggaagagaaaggagctggaggtccagcggcagaaggagttaatgcgccagaggcagcagcagcaagaggctctccggaggttgcagcagcagcagcagcaacaacagctggcgcagatgaagcttccttcttcttcaacgtggggccagcagtccaatacaacagcatgtcagtcccaggccacgctgtcgttggctgaaatccaaaaactagaggaagaacgagaacggcagcttcgagaagagcaaaggcgccagcagagggagttgatgaaagctcttcagcagcagcagcaacagcaacagcagaaactctcaggttgggggaatgtcagcaaaccttcaggtaccacgaaatctcttctggagatccagcaggaagaggccaggcaaatgcaaaagcagcagcagcagcagcagcaacaccagcaaccaaacagagctcgtaacaatacgcattccaacctgcacaccagcattgggaattctgtttggggctctataaatactggtcctcctaaccagtgggcatctgacctagtcagtagtatttggagtaatgctgacactaaaaactccaacatgggattctgggatgatgcagtgaaagaggtgggacctaggaattcaacaaataaaaataaaaacaacgccagtctcagtaaatctgtaggtgtgtctaaccggcagaataagaaagtagaagaagaagaaaagttgctgaagctctttcagggagtaaataaagcccaagatggatttacgcagtggtgtgaacagatgcttcatgcccttaatacggcaaataacttggatgttcccacatttgtttctttcctgaaagaagtagaatctccttatgaggtccatgattatatcagggcctatttaggagatacttctgaggccaaggagtttgccaagcagttccttgagcgccgtgccaaacagaaagccaaccagcagcgtcagcagcagcagctgccacagcagcagcagcagcagccgccacagcagccgccacagcagccacaacagcaggactctgtgtgggggatgaaccacagtacactccattcagtatttcagaccaatcaaagcaacaaccaacaatccaattttgaggctgtgcagagtggcaagaagaagaaaaagcagaagatggtccgagcagatcccagtttattaggattttcagtcaatgcatcatcggagcgactcaacatgggtgaaatcgagacgttggatgactactgagcacctgccagtggactggccatccctctcctgtctgccgactatggagtctccacctttggacacaacacttactcaccatttactctttatcactctgcaacaaatcacagaaccgatcatctcaggctttttcttctggccctttgtgtccaagattctttaatccatttttgttggtgaacatctcagactatagataagtggactggaccctgtgtcttgggggtggcagttgggattactccccaacaaggctgattttaggcagcatgtgttcactgtgctgtgatttcatctactgtctcccagaaagtgtgttgggatcggccattagcagcttgctttctcttgtcactttttttcttctattttgttttttcttcttctttttccccccatcagggcaaatggtctaactggtgcaatcatgaagagagttaatggttaacagacattggccaataacaaaacaccccatggactgtgactcgagtatccaacaggcagtcagagctctcccggtctgaaagttgcattgccactgctaactttgggattgcatcagagaggccctgagtggggttgagatgaggttggtttggtttgatgttacacactcctcacctgttctttctgagtgtcctttctctgaaaggatttatgtttttcttcgttagatagtgacttctgagcaagctgatctcccctggcatgctccaacctgattggacaaaggaagctctatggcctgggagagagactattcttaatttttctttcttacaaaaactgatttttcccataaatatttttacttcagaggactaggaccattttgttttgggcccttctgctgaaaatttgtctcgtttaagaggcagctagaatctttaccatatgtatgaatttgtataatttcatttttggatagggataaacttttgcttctgataaaagcctggaatttcatctggtcctcagagcattgcgtgtgtgtcttgctgtagcccggaaaaggttttgtgtaaagattctgggatggcaagttgtttgccttttctgaaaagagaacatacagaacctgtccatctttaagaccttcatccatggaatctactatacaggaggatgcagtgggctggaggggatgggcgaaaatgggagcaggaagcctggcctggcttctggtcatggcctcctaaaaccttaaacttcaagtagaaatgtactcaagccctatttataaacaaatacttttcctgcctccaccaaacccctacagaacatcacctggaattgccactcacactgggttggagtcattgggcagctgtgcctgtgcgagaggtgctgtggtctgggcagcccctggaaaagcacctttgctgcctgtcattgttgcctgaagaaggctggagttgctctgagagcagtttgggtttggagtattatatttggcttctatttttattattttggatcaccattctccctatcccttcttgcctccctcccttctaaacatgtgtaataactatacagagactgctacaaaattgtatatagtttttggatcaaatagcatgaggggagaggaaaccattaaaagttggggctcctactctcctttgctttgtaaattcaaaagttgggggtgggtaagagggatagttaaaatgtttacaaaactttaggctccctcggaacttttgccagtgtggaggaaaataaaaaagaacttaaataaaatctgattgtattctatctgagtgcacctcttgtactcacctttatggaggctgagttctgcactaaactgttcctcttggtaccatggaaaagctccaagcacccaagacatggaggcagccatggcttctttctctgccagaccacgtagcactggctggttctgtatttgagaatgtagaggtcaaggcagatgtcggtaagtttgaccaaatatcttttctctttttgactctccctttctgctaacatgtggatcagctcctgccctcataccgcagacacacccactctgaacacacccctccagagcttgcccacaccttcccaactagactctgtgtgtgtattcaggaaaaatgaaaataaatttttaaaaattgggagtggaatgggcagattagggggaacaaagtcattttggtcatggaacatccatttgcttaaccaaggagacttgcttctatctgaggaatttcccacttagtagaaagaaacactcttccctgggaatgtttgtttctgtctctctcaatgctactctctttcatattctcatttgctcaccctttcacttagagccaccgttttctcatcccattctatgaacttatttccaaattctcctaactattcctgagttttgaagtatttgttttgtaccctctctgcttccggttttttgtttggttggcttttttggagatagggtcttgtgatgttgcccacactggtctcgagcccctgggctcaagtgatcctcccgcctcagcctcctaaatatctaggactacaggtgtgtgccaccatgcccagctccagttttgttggttgatttgtttaaattcagagatttaaaaacatcccagacaagacagtttgattatggagactgtccccaagcagattggtgtgctggtggctgctgtgcataacagattccctccagattggcttacaacagctacttcattctgtgggtcaggaatttggatagggctcagctgggtggtggttctcctggggtattctttggttgtggtcagatgtcttccagggcatcattcctatgaaggcttaatgaattaggcaagctgtccaagatggctcactcgtgtaatgacagttgacgttggctgtaggctgggaactcagctgggttgatgactggaggagcttatgtgtgtcgtctccggaatggcagcttcagaggagttgaacttaagtggtgattggcttcccccagagaaccaggcagaagctgtgttacctttttgagctcttagctcaggagtcacatagagtcacttctgtgacactgtgttgcatcaaagtagtcacaaacccactcagattcaagagaagggagcatggccctctccctgcaaccccctccccccccgccttgatgaaaggagtgacaaggtcacattggagaagagcttgtggggtgggagatattatagccatttttgggaaatatctgcataaaatgagtttatgcatacatgaaggactttattttcattggctttaagttgagggtttttgtttttgtttttgtattggagatgggttcttactatgttgcccaggctggtctcaaacccctgggctcaagtgatcctgttgcctcagcctcccaagtagctgggactacagctatgtgccagtgcacccagcttgttttttttaaattttaggatagataatggtacttctggctttatttaaataatttttttagggaaaccattgtatttatacatgcatatatttttatatatacaaatatgtatataaaagtatatgttttacattttcaatatatatataatatatacatatatgttatatacgtatatatattgcaccctactttaaaattgactgataacaaaattggtaattttgtataaaatgcccaactgtgcattattaataaaagtatgtgaatgactctaa

SEQ ID NO: 52 - protein, 1299 aa, Homosapiens; identical to SEQ ID NO: 2

SEQ ID NO: 53 - DNA, 2695 bp, Homosapiens
catcttgtgttgttgaggctgaggactgactggggttctgagactccctgtcccggaccgcagcgttaaaaggatctgaacaaagtctgctcaaatctcctgctgtgaaccagcagaatttttgaacaggtttcttcacatataaaaatctattgtaaaaatacggaaaagaatggcagcggaaacgcagacactgaactttgggcctgaatggctccgagctctgtccagtggtgggagtattacatcccctcctctttctccagcattgccgaagtataaattagcagattatcgttacggcagagaagaaatgttagcacttttccttaaagacaacaagataccttcagaccttctggataaagaatttctgcctatcctccaggaggaaccccttccaccattggctctggtaccctttacagaagaagaacagagaaacttttccatgtctgtaaatagtgctgctgtcctgcgattgacaggacgaggaggaggaggaacagtggtgggggctcctagaggtcgaagttcttcaagagggcgaggcagaggcagaggtgaatgtggtttctaccaaagaagttttgatgaagtagagggtgtttttggtcgaggaggtggcagagaaatgcatagatcgcagagctgggaggaaaggggtgacagacgttttgaaaaaccaggacgaaaagatgtagggagaccaaattttgaggaaggtggaccaacatcagtagggagaaagcatgaatttatacgctcagaaagtgaaaattggcgcatctttagagaggaacaaaatggagaagatgaagatggaggttggcgactagctggatcaaggagggatggagagaggtggcgacctcacagtcctgatggccctcgttctgcaggctggcgggaacacatggaacgacgtcggaggtttgagtttgattttcgagatagagatgatgaacggggttaccgaagggttcgctctggcagtgggagcatagatgatgacagggatagcttgcccgaatggtgcttagaggatgctgaagaagaaatgggtacatttgactcatctggagcattcctttctctaaaaaaagtacagaaagagcctattccagaagagcaggagatggacttccggcctgtggacgaaggggaggagtgctctgactctgagggtagccataatgaagaggccaaagaacccgataagacaaataagaaagaaggagagaaaacagatagagtaggagttgaagctagtgaggaaactccccagacctcatcatcatctgctagaccaggtactccttcagaccatcagtctcaggaagcatcacagtttgagaggaaagatgaaccaaaaactgagcaaacggaaaaagctgaagaggagactcggatggaaaatagtctaccagccaaagtgcccagcagaggggatgaaatggttgctgatgtccagcagcccctgtcgcagattccttcagatacagcctctcctcttctcatacttccacctcctgttcccaatcctagtcctactctccggccagttgaaacaccagttgtaggtgctcctggtatgggcagtgtttccacagaacctgatgatgaagaaggtctcaaacatttggagcagcaagctgagaaaatggtggcttatctccaagacagtgcactagatgatgaaagattggcatcaaaactgcaagagcacagagctaaaggagtgtcgattccattgatgcatgaagcaatgcagaagtggtattacaaagatcctcagggagaaattcaaggtcccttcaataatcaggagatggcagaatggtttcaggcgggctattttactatgtctttattggtgaagagagcgtgtgatgaaagcttccaacctcttggcgatatcatgaaaatgtggggaagggttcccttttctccaggtccagctccccctcctcatatgggagagctggaccaggaacgactgaccaggcagcaagaactcacagccttataccagatgcagcacctgcagtaccagcagtttttaatacaacaacaatatgcacaggttttggcccaacagcagaaagcagcactgtcttcccagcagcagcagcagttggcacttcttcttcaacagtttcagaccttgaagatgagaatatctgatcagaacatcattccctcagtaactaggtctgtgtccgtgccagatactggctctatctgggagcttcagccaacagcttcacagcctacagtttgggaaggtggtagtgtatgggatcttcctctggacaccacgacaccaggccctgccctggaacagcttcagcagctagagaaggccaaagctgcaaagctagagcaagagagaagagaggcagaaatgagggcaaaacgggaagaggaagagcgaaagaggcaggaagaactccgaagacaacaggaggaaattcttcggcgacagcaggaagaagaaaggaaaaggcgagaggaagaagaacttgcccgaaggaaacaggaagaggctctgcgtcgccagcgggagcaagaaattgcattaaggcgacagcgagaagaggaagaaagacagcagcaagaagaagctcttagaagactggaagagaggagaagagaagaggaagaaaggcggaagcaggaagaattgttacgc

SEQ ID NO: 54 - protein, 840 aa, Homosapiens
MAAETQTLNFGPEWLRALSSGGSITSPPLSPALPKYKLADYRYGREEMLALFLKDNKIPSDLLDKEFLPILQEEPLPPLALVPFTEEEQRNFSMSVNSAAVLRLTGRGGGGTVVGAPRGRSSSRGRGRGRGECGFYQRSFDEVEGVFGRGGGREMHRSQSWEERGDRRFEKPGRKDVGRPNFEEGGPTSVGRKHEFIRSESENWRIFREEQNGEDEDGGWRLAGSRRDGERWRPHSPDGPRSAGWREHMERRRRFEFDFRDRDDERGYRRVRSGSGSIDDDRDSLPEWCLEDAEEEMGTFDSSGAFLSLKKVQKEPIPEEQEMDFRPVDEGEECSDSEGSHNEEAKEPDKTNKKEGEKTDRVGVEASEETPQTSSSSARPGTPSDHQSQEASQFERKDEPKTEQTEKAEEETRMENSLPAKVPSRGDEMVADVQQPLSQIPSDTASPLLILPPPVPNPSPTLRPVETPVVGAPGMGSVSTEPDDEEGLKHLEQQAEKMVAYLQDSALDDERLASKLQEHRAKGVSIPLMHEAMQKWYYKDPQGEIQGPFNNQEMAEWFQAGYFTMSLLVKRACDESFQPLGDIMKMWGRVPFSPGPAPPPHMGELDQERLTRQQELTALYQMQHLQYQQFLIQQQYAQVLAQQQKAALSSQQQQQLALLLQQFQTLKMRISDQNIIPSVTRSVSVPDTGSIWELQPTASQPTVWEGGSVWDLPLDTTTPGPALEQLQQLEKAKAAKLEQERREAEMRAKREEEERKRQEELRRQQEEILRRQQEEERKRREEEELARRKQEEALRRQREQEIALRRQREEEERQQQEEALRRLEERRREEEERRKQEELL

SEQ ID NO: 55 - DNA, 5838 bp, Homosapiens
catcttgtgttgttgaggctgaggactgactggggttctgagactccctgtcccggaccgcagcgttaaaaggatctgaacaaagtctgctcaaatctcctgctgtgaaccagcagaatttttgaacaggtttcttcacatataaaaatctattgtaaaaatacggaaaagaatggcagcggaaacgcagacactgaactttgggcctgaatggctccgagctctgtccagtggtgggagtattacatcccctcctctttctccagcattgccgaagtataaattagcagattatcgttacggcagagaagaaatgttagcacttttccttaaagacaacaagataccttcagaccttctggataaagaatttctgcctatcctccaggaggaaccccttccaccattggctctggtaccctttacagaagaagaacagagaaacttttccatgtctgtaaatagtgctgctgtcctgcgattgacaggacgaggaggaggaggaacagtggtgggggctcctagaggtcgaagttcttcaagagggcgaggcagaggcagaggtgaatgtggtttctaccaaagaagttttgatgaagtagagggtgtttttggtcgaggaggtggcagagaaatgcatagatcgcagagctgggaggaaaggggtgacagacgttttgaaaaaccaggacgaaaagatgtagggagaccaaattttgaggaaggtggaccaacatcagtagggagaaagcatgaatttatacgctcagaaagtgaaaattggcgcatctttagagaggaacaaaatggagaagatgaagatggaggttggcgactagctggatcaaggagggatggagagaggtggcgacctcacagtcctgatggccctcgttctgcaggctggcgggaacacatggaacgacgtcggaggtttgagtttgattttcgagatagagatgatgaacggggttaccgaagggttcgctctggcagtgggagcatagatgatgacagggatagcttgcccgaatggtgcttagaggatgctgaagaagaaatgggtacatttgactcatctggagcattcctttctctaaaaaaagtacagaaagagcctattccagaagagcaggagatggacttccggcctgtggacgaaggggaggagtgctctgactctgagggtagccataatgaagaggccaaagaacccgataagacaaataagaaagaaggagagaaaacagatagagtaggagttgaagctagtgaggaaactccccagacctcatcatcatctgctagaccaggtactccttcagaccatcagtctcaggaagcatcacagtttgagaggaaagatgaaccaaaaactgagcaaacggaaaaagctgaagaggagactcggatggaaaatagtctaccagccaaagtgcccagcagaggggatgaaatggttgctgatgtccagcagcccctgtcgcagattccttcagatacagcctctcctcttctcatacttccacctcctgttcccaatcctagtcctactctccggccagttgaaacaccagttgtaggtgctcctggtatgggcagtgtttccacagaacctgatgatgaagaaggtctcaaacatttggagcagcaagctgagaaaatggtggcttatctccaagacagtgcactagatgatgaaagattggcatcaaaactgcaagagcacagagctaaaggagtgtcgattccattgatgcatgaagcaatgcagaagtggtattacaaagatcctcagggagaaattcaaggtcccttcaataatcaggagatggcagaatggtttcaggcgggctattttactatgtctttattggtgaagagagcgtgtgatgaaagcttccaacctcttggcgatatcatgaaaatgtggggaagggttcccttttctccaggtccagctccccctcctcatatgggagagctggaccaggaacgactgaccaggcagcaagaactcacagccttataccagatgcagcacctgcagtaccagcagtttttaatacaacaacaatatgcacaggttttggcccaacagcagaaagcagcactgtcttcccagcagcagcagcagttggcacttcttcttcaacagtttcagaccttgaagatgagaatatctgatcagaacatcattccctcagtaactaggtctgtgtccgtgccagatactggctctatctgggagcttcagccaacagcttcacagcctacagtttgggaaggtggtagtgtatgggatcttcctctggacaccacgacaccaggccctgccctggaacagcttcagcagctagagaaggccaaagctgcaaagctagagcaagagagaagagaggcagaaatgagggcaaaacgggaagaggaagagcgaaagaggcaggaagaactccgaagacaacaggaggaaattcttcggcgacagcaggaagaagaaaggaaaaggcgagaggaagaagaacttgcccgaaggaaacaggaagaggctctgcgtcgccagcgggagcaagaaattgcattaaggcgacagcgagaagaggaagaaagacagcagcaagaagaagctcttagaagactggaagagaggagaagagaagaggaagaaaggcggaagcaggaagaattgttacgcaaacaggaagaggaggctgcaaaatgggcccgggaagaagaagaagcccagcgtcgattagaggagaaccggctgcggatggaagaggaggcagccagactccggcatgaggaagaagaacggaagagaaaggagctggaggtccagcggcagaaggagttaatgcgccagaggcagcagcagcaagaggctctccggaggttgcagcagcagcagcagcaacaacagctggcgcagatgaagcttccttcttcttcaacgtggggccagcagtccaatacaacagcatgtcagtcccaggccacgctgtcgttggctgaaatccaaaaactagaggaagaacgagaacggcagcttcgagaagagcaaaggcgccagcagagggagttgatgaaagctcttcagcagcagcagcaacagcaacagcagaaactctcaggttgggggaatgtcagcaaaccttcaggtaccacgaaatctcttctggagatccagcaggaagaggccaggcaaatgcaaaagcagcagcagcagcagcagcaacaccagcaaccaaacagagctcgtaacaatacgcattccaacctgcacaccagcattgggaattctgtttggggctctataaatactggtcctcctaaccagtgggcatctgacctagtcagtagtatttggagtaatgctgacactaaaaactccaacatgggattctgggatgatgcagtgaaagaggtgggacctaggaattcaacaaataaaaataaaaacaacgccagtctcagtaaatctgtaggtgtgtctaaccggcagaataagaaagtagaagaagaagaaaagttgctgaagctctttcagggagtaaataaagcccaagatggatttacgcagtggtgtgaacagatgcttcatgcccttaatacggcaaataacttggatgttcccacatttgtttctttcctgaaagaagtagaatctccttatgaggtccatgattatatcagggcctatttaggagatacttctgaggccaaggagtttgccaagcagttccttgagcgccgtgccaaacagaaagccaaccagcagcgtcagcagcagcagctgccacagcagcagcagcagcagccgccacagcagccgccacagcagccacaacagcaggactctgtgtgggggatgaaccacagtacactccattcagtatttcagaccaatcaaagcaacaaccaacaatccaattttgaggctgtgcagagtggcaagaagaagaaaaagcagaagatggtccgagcagatcccagtttattaggattttcagtcaatgcatcatcggagcgactcaacatgggtgaaatcgagacgttggatgactactgagcacctgccagtggactggccatccctctcctgtctgccgactatggagtctccacctttggacacaacacttactcaccatttactctttatcactctgcaacaaatcacagaaccgatcatctcaggctttttcttctggccctttgtgtccaagattctttaatccatttttgttggtgaacatctcagactatagataagtggactggaccctgtgtcttgggggtggcagttgggattactccccaacaaggctgattttaggcagcatgtgttcactgtgctgtgatttcatctactgtctcccagaaagtgtgttgggatcggccattagcagcttgctttctcttgtcactttttttcttctattttgttttttcttcttctttttccccccatcagggcaaatggtctaactggtgcaatcatgaagagagttaatggttaacagacattggccaataacaaaacaccccatggactgtgactcgagtatccaacaggcagtcagagctctcccggtctgaaagttgcattgccactgctaactttgggattgcatcagagaggccctgagtggggttgagatgaggttggtttggtttgatgttacacactcctcacctgttctttctgagtgtcctttctctgaaaggatttatgtttttcttcgttagatagtgacttctgagcaagctgatctcccctggcatgctccaacctgattggacaaaggaagctctatggcctgggagagagactattcttaatttttctttcttacaaaaactgatttttcccataaatatttttacttcagaggactaggaccattttgttttgggcccttctgctgaaaatttgtctcgtttaagaggcagctagaatctttaccatatgtatgaatttgtataatttcatttttggatagggataaacttttgcttctgataaaagcctggaatttcatctggtcctcagagcattgcgtgtgtgtcttgctgtagcccggaaaaggttttgtgtaaagattctgggatggcaagttgtttgccttttctgaaaagagaacatacagaacctgtccatctttaagaccttcatccatggaatctactatacaggaggatgcagtgggctggaggggatgggcgaaaatgggagcaggaagcctggcctggcttctggtcatggcctcctaaaaccttaaacttcaagtagaaatgtactcaagccctatttataaacaaatacttttcctgcctccaccaaacccctacagaacatcacctggaattgccactcacactgggttggagtcattgggcagctgtgcctgtgcgagaggtgctgtggtctgggcagcccctggaaaagcacctttgctgcctgtcattgttgcctgaagaaggctggagttgctctgagagcagtttgggtttggagtattatatttggcttctatttttattattttggatcaccattctccctatcccttcttgcctccctcccttctaaacatgtgtaataactatacagagactgctacaaaattgtatatagtttttggatcaaatagcatgaggggagaggaaaccattaaaagttggggctcctactctcctttgctttgtaaattcaaaagttgggggtgggtaagagggatagttaaaatgtttacaaaactttaggctccctcggaacttttgccagtgtggaggaaaataaaaaagaacttaaataaaatctgattgtattct

SEQ ID NO: 56 - protein, 1299 aa, Homosapiens; identical to SEQ ID NO: 2

SEQ ID NO: 57 - DNA, 5973 bp, Homosapiens
atcttgtgttgttgaggctgaggactgactggggttctgagactccctgtcccggaccgcagattatagtgggaccagtctcattaggttgaatctacagcctatgttggtgttaacccaggtctcttagagcgttaaaaggatctgaacaaagtctgctcaaatctcctgctgtgaaccagcagaatttttgaacaggtttcttcacatataaaaatctattgtaaaaatacggaaaagaatggcagcggaaacgcagacactgaactttgggcctgaatggctccgagctctgtccagtggtgggagtattacatcccctcctctttctccagcattgccgaagtataaattagcagattatcgttacggcagagaagaaatgttagcacttttccttaaagacaacaagataccttcagaccttctggataaagaatttctgcctatcctccaggaggaaccccttccaccattggctctggtaccctttacagaagaagaacagagaaacttttccatgtctgtaaatagtgctgctgtcctgcgattgacaggacgaggaggaggaggaacagtggtgggggctcctagaggtcgaagttcttcaagagggcgaggcagaggcagaggtgaatgtggtttctaccaaagaagttttgatgaagtagagggtgtttttggtcgaggaggtggcagagaaatgcatagatcgcagagctgggaggaaaggggtgacagacgttttgaaaaaccaggacgaaaagatgtaggaaagaagaatggatattattgcatgtactcaccagttcttttgctgggtcagcctttatgccaagggagaccaaattttgaggaaggtggaccaacatcagtagggagaaagcatgaatttatacgctcagaaagtgaaaattggcgcatctttagagaggaacaaaatggagaagatgaagatggaggttggcgactagctggatcaaggagggatggagagaggtggcgacctcacagtcctgatggccctcgttctgcaggctggcgggaacacatggaacgacgtcggaggtttgagtttgattttcgagatagagatgatgaacggggttaccgaagggttcgctctggcagtgggagcatagatgatgacagggatagcttgcccgaatggtgcttagaggatgctgaagaagaaatgggtacatttgactcatctggagcattcctttctctaaaaaaagtacagaaagagcctattccagaagagcaggagatggacttccggcctgtggacgaaggggaggagtgctctgactctgagggtagccataatgaagaggccaaagaacccgataagacaaataagaaagaaggagagaaaacagatagagtaggagttgaagctagtgaggaaactccccagacctcatcatcatctgctagaccaggtactccttcagaccatcagtctcaggaagcatcacagtttgagaggaaagatgaaccaaaaactgagcaaacggaaaaagctgaagaggagactcggatggaaaatagtctaccagccaaagtgcccagcagaggggatgaaatggttgctgatgtccagcagcccctgtcgcagattccttcagatacagcctctcctcttctcatacttccacctcctgttcccaatcctagtcctactctccggccagttgaaacaccagttgtaggtgctcctggtatgggcagtgtttccacagaacctgatgatgaagaaggtctcaaacatttggagcagcaagctgagaaaatggtggcttatctccaagacagtgcactagatgatgaaagattggcatcaaaactgcaagagcacagagctaaaggagtgtcgattccattgatgcatgaagcaatgcagaagtggtattacaaagatcctcagggagaaattcaaggtcccttcaataatcaggagatggcagaatggtttcaggcgggctattttactatgtctttattggtgaagagagcgtgtgatgaaagcttccaacctcttggcgatatcatgaaaatgtggggaagggttcccttttctccaggtccagctccccctcctcatatgggagagctggaccaggaacgactgaccaggcagcaagaactcacagccttataccagatgcagcacctgcagtaccagcagtttttaatacaacaacaatatgcacaggttttggcccaacagcagaaagcagcactgtcttcccagcagcagcagcagttggcacttcttcttcaacagtttcagaccttgaagatgagaatatctgatcagaacatcattccctcagtaactaggtctgtgtccgtgccagatactggctctatctgggagcttcagccaacagcttcacagcctacagtttgggaaggtggtagtgtatgggatcttcctctggacaccacgacaccaggccctgccctggaacagcttcagcagctagagaaggccaaagctgcaaagctagagcaagagagaagagaggcagaaatgagggcaaaacgggaagaggaagagcgaaagaggcaggaagaactccgaagacaacaggaggaaattcttcggcgacagcaggaagaagaaaggaaaaggcgagaggaagaagaacttgcccgaaggaaacaggaagaggctctgcgtcgccagcgggagcaagaaattgcattaaggcgacagcgagaagaggaagaaagacagcagcaagaagaagctcttagaagactggaagagaggagaagagaagaggaagaaaggcggaagcaggaagaattgttacgcaaacaggaagaggaggctgcaaaatgggcccgggaagaagaagaagcccagcgtcgattagaggagaaccggctgcggatggaagaggaggcagccagactccggcatgaggaagaagaacggaagagaaaggagctggaggtccagcggcagaaggagttaatgcgccagaggcagcagcagcaagaggctctccggaggttgcagcagcagcagcagcaacaacagctggcgcagatgaagcttccttcttcttcaacgtggggccagcagtccaatacaacagcatgtcagtcccaggccacgctgtcgttggctgaaatccaaaaactagaggaagaacgagaacggcagcttcgagaagagcaaaggcgccagcagagggagttgatgaaagctcttcagcagcagcagcaacagcaacagcagaaactctcaggttgggggaatgtcagcaaaccttcaggtaccacgaaatctcttctggagatccagcaggaagaggccaggcaaatgcaaaagcagcagcagcagcagcagcaacaccagcaaccaaacagagctcgtaacaatacgcattccaacctgcacaccagcattgggaattctgtttggggctctataaatactggtcctcctaaccagtgggcatctgacctagtcagtagtatttggagtaatgctgacactaaaaactccaacatgggattctgggatgatgcagtgaaagaggtgggacctaggaattcaacaaataaaaataaaaacaacgccagtctcagtaaatctgtaggtgtgtctaaccggcagaataagaaagtagaagaagaagaaaagttgctgaagctctttcagggagtaaataaagcccaagatggatttacgcagtggtgtgaacagatgcttcatgcccttaatacggcaaataacttggatgttcccacatttgtttctttcctgaaagaagtagaatctccttatgaggtccatgattatatcagggcctatttaggagatacttctgaggccaaggagtttgccaagcagttccttgagcgccgtgccaaacagaaagccaaccagcagcgtcagcagcagcagctgccacagcagcagcagcagcagccgccacagcagccgccacagcagccacaacagcaggactctgtgtgggggatgaaccacagtacactccattcagtatttcagaccaatcaaagcaacaaccaacaatccaattttgaggctgtgcagagtggcaagaagaagaaaaagcagaagatggtccgagcagatcccagtttattaggattttcagtcaatgcatcatcggagcgactcaacatgggtgaaatcgagacgttggatgactactgagcacctgccagtggactggccatccctctcctgtctgccgactatggagtctccacctttggacacaacacttactcaccatttactctttatcactctgcaacaaatcacagaaccgatcatctcaggctttttcttctggccctttgtgtccaagattctttaatccatttttgttggtgaacatctcagactatagataagtggactggaccctgtgtcttgggggtggcagttgggattactccccaacaaggctgattttaggcagcatgtgttcactgtgctgtgatttcatctactgtctcccagaaagtgtgttgggatcggccattagcagcttgctttctcttgtcactttttttcttctattttgttttttcttcttctttttccccccatcagggcaaatggtctaactggtgcaatcatgaagagagttaatggttaacagacattggccaataacaaaacaccccatggactgtgactcgagtatccaacaggcagtcagagctctcccggtctgaaagttgcattgccactgctaactttgggattgcatcagagaggccctgagtggggttgagatgaggttggtttggtttgatgttacacactcctcacctgttctttctgagtgtcctttctctgaaaggatttatgtttttcttcgttagatagtgacttctgagcaagctgatctcccctggcatgctccaacctgattggacaaaggaagctctatggcctgggagagagactattcttaatttttctttcttacaaaaactgatttttcccataaatatttttacttcagaggactaggaccattttgttttgggcccttctgctgaaaatttgtctcgtttaagaggcagctagaatctttaccatatgtatgaatttgtataatttcatttttggatagggataaacttttgcttctgataaaagcctggaatttcatctggtcctcagagcattgcgtgtgtgtcttgctgtagcccggaaaaggttttgtgtaaagattctgggatggcaagttgtttgccttttctgaaaagagaacatacagaacctgtccatctttaagaccttcatccatggaatctactatacaggaggatgcagtgggctggaggggatgggcgaaaatgggagcaggaagcctggcctggcttctggtcatggcctcctaaaaccttaaacttcaagtagaaatgtactcaagccctatttataaacaaatacttttcctgcctccaccaaacccctacagaacatcacctggaattgccactcacactgggttggagtcattgggcagctgtgcctgtgcgagaggtgctgtggtctgggcagcccctggaaaagcacctttgctgcctgtcattgttgcctgaagaaggctggagttgctctgagagcagtttgggtttggagtattatatttggcttctatttttattattttggatcaccattctccctatcccttcttgcctccctcccttctaaacatgtgtaataactatacagagactgctacaaaattgtatatagtttttggatcaaatagcatgaggggagaggaaaccattaaaagttggggctcctactctcctttgctttgtaaattcaaaagttgggggtgggtaagagggatagttaaaatgtttacaaaactttaggctccctcggaacttttgccagtgtggaggaaaataaaaaagaacttaaataaaatctgattgtattct

SEQ ID NO: 58 - protein, 1321 aa, Homosapiens
MAAETQTLNFGPEWLRALSSGGSITSPPLSPALPKYKLADYRYGREEMLALFLKDNKIPSDLLDKEFLPILQEEPLPPLALVPFTEEEQRNFSMSVNSAAVLRLTGRGGGGTVVGAPRGRSSSRGRGRGRGECGFYQRSFDEVEGVFGRGGGREMHRSQSWEERGDRRFEKPGRKDVGKKNGYYCMYSPVLLLGQPLCQGRPNFEEGGPTSVGRKHEFIRSESENWRIFREEQNGEDEDGGWRLAGSRRDGERWRPHSPDGPRSAGWREHMERRRRFEFDFRDRDDERGYRRVRSGSGSIDDDRDSLPEWCLEDAEEEMGTFDSSGAFLSLKKVQKEPIPEEQEMDFRPVDEGEECSDSEGSHNEEAKEPDKTNKKEGEKTDRVGVEASEETPQTSSSSARPGTPSDHQSQEASQFERKDEPKTEQTEKAEEETRMENSLPAKVPSRGDEMVADVQQPLSQIPSDTASPLLILPPPVPNPSPTLRPVETPVVGAPGMGSVSTEPDDEEGLKHLEQQAEKMVAYLQDSALDDERLASKLQEHRAKGVSIPLMHEAMQKWYYKDPQGEIQGPFNNQEMAEWFQAGYFTMSLLVKRACDESFQPLGDIMKMWGRVPFSPGPAPPPHMGELDQERLTRQQELTALYQMQHLQYQQFLIQQQYAQVLAQQQKAALSSQQQQQLALLLQQFQTLKMRISDQNIIPSVTRSVSVPDTGSIWELQPTASQPTVWEGGSVWDLPLDTTTPGPALEQLQQLEKAKAAKLEQERREAEMRAKREEEERKRQEELRRQQEEILRRQQEEERKRREEEELARRKQEEALRRQREQEIALRRQREEEERQQQEEALRRLEERRREEEERRKQEELLRKQEEEAAKWAREEEEAQRRLEENRLRMEEEAARLRHEEEERKRKELEVQRQKELMRQRQQQQEALRRLQQQQQQQQLAQMKLPSSSTWGQQSNTTACQSQATLSLAEIQKLEEERERQLREEQRRQQRELMKALQQQQQQQQQKLSGWGNVSKPSGTTKSLLEIQQEEARQMQKQQQQQQQHQQPNRARNNTHSNLHTSIGNSVWGSINTGPPNQWASDLVSSIWSNADTKNSNMGFWDDAVKEVGPRNSTNKNKNNASLSKSVGVSNRQNKKVEEEEKLLKLFQGVNKAQDGFTQWCEQMLHALNTANNLDVPTFVSFLKEVESPYEVHDYIRAYLGDTSEAKEFAKQFLERRAKQKANQQRQQQQLPQQQQQQPPQQPPQQPQQQDSVWGMNHSTLHSVFQTNQSNNQQSNFEAVQSGKKKKKQKMVRADPSLLGFSVNASSERLNMGEIETLDDY

SEQ ID NO: 59 - DNA, 7924 bp, Homosapiens
atcttgtgttgttgaggctgaggactgactggggttctgagactccctgtcccggaccgcagattatagtgggaccagtctcattaggttgaatctacagcctatgttggtgttaacccaggtctcttagagcgttaaaaggatctgaacaaagtctgctcaaatctcctgctgtgaaccagcagaatttttgaacaggtttcttcacatataaaaatctattgtaaaaatacggaaaagaatggcagcggaaacgcagacactgaactttgggcctgaatggctccgagctctgtccagtggtgggagtattacatcccctcctctttctccagcattgccgaagtataaattagcagattatcgttacggcagagaagaaatgttagcacttttccttaaagacaacaagataccttcagaccttctggataaagaatttctgcctatcctccaggaggaaccccttccaccattggctctggtaccctttacagaagaagaacagagaaacttttccatgtctgtaaatagtgctgctgtcctgcgattgacaggacgaggaggaggaggaacagtggtgggggctcctagaggtcgaagttcttcaagagggcgaggcagaggcagaggtgaatgtggtttctaccaaagaagttttgatgaagtagagggtgtttttggtcgaggaggtggcagagaaatgcatagatcgcagagctgggaggaaaggggtgacagacgttttgaaaaaccaggacgaaaagatgtaggaaagaagaatggatattattgcatgtactcaccagttcttttgctgggtcagcctttatgccaagggagaccaaattttgaggaaggtggaccaacatcagtagggagaaagcatgaatttatacgctcagaaagtgaaaattggcgcatctttagagaggaacaaaatggagaagatgaagatggaggttggcgactagctggatcaaggagggatggagagaggtggcgacctcacagtcctgatggccctcgttctgcaggctggcgggaacacatggaacgacgtcggaggtttgagtttgattttcgagatagagatgatgaacggggttaccgaagggttcgctctggcagtgggagcatagatgatgacagggatagcttgcccgaatggtgcttagaggatgctgaagaagaaatgggtacatttgactcatctggagcattcctttctctaaaaaaagtacagaaagagcctattccagaagagcaggagatggacttccggcctgtggacgaaggggaggagtgctctgactctgagggtagccataatgaagaggccaaagaacccgataagacaaataagaaagaaggagagaaaacagatagagtaggagttgaagctagtgaggaaactccccagacctcatcatcatctgctagaccaggtactccttcagaccatcagtctcaggaagcatcacagtttgagaggaaagatgaaccaaaaactgagcaaacggaaaaagctgaagaggagactcggatggaaaatagtctaccagccaaagtgcccagcagaggggatgaaatggttgctgatgtccagcagcccctgtcgcagattccttcagatacagcctctcctcttctcatacttccacctcctgttcccaatcctagtcctactctccggccagttgaaacaccagttgtaggtgctcctggtatgggcagtgtttccacagaacctgatgatgaagaaggtctcaaacatttggagcagcaagctgagaaaatggtggcttatctccaagacagtgcactagatgatgaaagattggcatcaaaactgcaagagcacagagctaaaggagtgtcgattccattgatgcatgaagcaatgcagaagtggtattacaaagatcctcagggagaaattcaaggtcccttcaataatcaggagatggcagaatggtttcaggcgggctattttactatgtctttattggtgaagagagcgtgtgatgaaagcttccaacctcttggcgatatcatgaaaatgtggggaagggttcccttttctccaggtccagctccccctcctcatatgggagagctggaccaggaacgactgaccaggcagcaagaactcacagccttataccagatgcagcacctgcagtaccagcagtttttaatacaacaacaatatgcacaggttttggcccaacagcagaaagcagcactgtcttcccagcagcagcagcagttggcacttcttcttcaacagtttcagaccttgaagatgagaatatctgatcagaacatcattccctcagtaactaggtctgtgtccgtgccagatactggctctatctgggagcttcagccaacagcttcacagcctacagtttgggaaggtggtagtgtatgggatcttcctctggacaccacgacaccaggccctgccctggaacagcttcagcagctagagaaggccaaagctgcaaagctagagcaagagagaagagaggcagaaatgagggcaaaacgggaagaggaagagcgaaagaggcaggaagaactccgaagacaacaggaggaaattcttcggcgacagcaggaagaagaaaggaaaaggcgagaggaagaagaacttgcccgaaggaaacaggaagaggctctgcgtcgccagcgggagcaagaaattgcattaaggcgacagcgagaagaggaagaaagacagcagcaagaagaagctcttagaagactggaagagaggagaagagaagaggaagaaaggcggaagcaggaagaattgttacgcaaacaggaagaggaggctgcaaaatgggcccgggaagaagaagaagcccagcgtcgattagaggagaaccggctgcggatggaagaggaggcagccagactccggcatgaggaagaagaacggaagagaaaggagctggaggtccagcggcagaaggagttaatgcgccagaggcagcagcagcaagaggctctccggaggttgcagcagcagcagcagcaacaacagctggcgcagatgaagcttccttcttcttcaacgtggggccagcagtccaatacaacagcatgtcagtcccaggccacgctgtcgttggctgaaatccaaaaactagaggaagaacgagaacggcagcttcgagaagagcaaaggcgccagcagagggagttgatgaaagctcttcagcagcagcagcaacagcaacagcagaaactctcaggttgggggaatgtcagcaaaccttcaggtaccacgaaatctcttctggagatccagcaggaagaggccaggcaaatgcaaaagcagcagcagcagcagcagcaacaccagcaaccaaacagagctcgtaacaatacgcattccaacctgcacaccagcattgggaattctgtttggggctctataaatactggtcctcctaaccagtgggcatctgacctagtcagtagtatttggagtaatgctgacactaaaaactccaacatgggattctgggatgatgcagtgaaagaggtgggacctaggaattcaacaaataaaaataaaaacaacgccagtctcagtaaatctgtaggtgtgtctaaccggcagaataagaaagtagaagaagaagaaaagttgctgaagctctttcagggagtaaataaagcccaagatggatttacgcagtggtgtgaacagatgcttcatgcccttaatacggcaaataacttggatgttcccacatttgtttctttcctgaaagaagtagaatctccttatgaggtccatgattatatcagggcctatttaggagatacttctgaggccaaggagtttgccaagcagttccttgagcgccgtgccaaacagaaagccaaccagcagcgtcagcagcagcagctgccacagcagcagcagcagcagccgccacagcagccgccacagcagccacaacagcaggactctgtgtgggggatgaaccacagtacactccattcagtatttcagaccaatcaaagcaacaaccaacaatccaattttgaggctgtgcagagtggcaagaagaagaaaaagcagaagatggtccgagcagatcccagtttattaggattttcagtcaatgcatcatcggagcgactcaacatgggtgaaatcgagacgttggatgactactgagcacctgccagtggactggccatccctctcctgtctgccgactatggagtctccacctttggacacaacacttactcaccatttactctttatcactctgcaacaaatcacagaaccgatcatctcaggctttttcttctggccctttgtgtccaagattctttaatccatttttgttggtgaacatctcagactatagataagtggactggaccctgtgtcttgggggtggcagttgggattactccccaacaaggctgattttaggcagcatgtgttcactgtgctgtgatttcatctactgtctcccagaaagtgtgttgggatcggccattagcagcttgctttctcttgtcactttttttcttctattttgttttttcttcttctttttccccccatcagggcaaatggtctaactggtgcaatcatgaagagagttaatggttaacagacattggccaataacaaaacaccccatggactgtgactcgagtatccaacaggcagtcagagctctcccggtctgaaagttgcattgccactgctaactttgggattgcatcagagaggccctgagtggggttgagatgaggttggtttggtttgatgttacacactcctcacctgttctttctgagtgtcctttctctgaaaggatttatgtttttcttcgttagatagtgacttctgagcaagctgatctcccctggcatgctccaacctgattggacaaaggaagctctatggcctgggagagagactattcttaatttttctttcttacaaaaactgatttttcccataaatatttttacttcagaggactaggaccattttgttttgggcccttctgctgaaaatttgtctcgtttaagaggcagctagaatctttaccatatgtatgaatttgtataatttcatttttggatagggataaacttttgcttctgataaaagcctggaatttcatctggtcctcagagcattgcgtgtgtgtcttgctgtagcccggaaaaggttttgtgtaaagattctgggatggcaagttgtttgccttttctgaaaagagaacatacagaacctgtccatctttaagaccttcatccatggaatctactatacaggaggatgcagtgggctggaggggatgggcgaaaatgggagcaggaagcctggcctggcttctggtcatggcctcctaaaaccttaaacttcaagtagaaatgtactcaagccctatttataaacaaatacttttcctgcctccaccaaacccctacagaacatcacctggaattgccactcacactgggttggagtcattgggcagctgtgcctgtgcgagaggtgctgtggtctgggcagcccctggaaaagcacctttgctgcctgtcattgttgcctgaagaaggctggagttgctctgagagcagtttgggtttggagtattatatttggcttctatttttattattttggatcaccattctccctatcccttcttgcctccctcccttctaaacatgtgtaataactatacagagactgctacaaaattgtatatagtttttggatcaaatagcatgaggggagaggaaaccattaaaagttggggctcctactctcctttgctttgtaaattcaaaagttgggggtgggtaagagggatagttaaaatgtttacaaaactttaggctccctcggaacttttgccagtgtggaggaaaataaaaaagaacttaaataaaatctgattgtattctatctgagtgcacctcttgtactcacctttatggaggctgagttctgcactaaactgttcctcttggtaccatggaaaagctccaagcacccaagacatggaggcagccatggcttctttctctgccagaccacgtagcactggctggttctgtatttgagaatgtagaggtcaaggcagatgtcggtaagtttgaccaaatatcttttctctttttgactctccctttctgctaacatgtggatcagctcctgccctcataccgcagacacacccactctgaacacacccctccagagcttgcccacaccttcccaactagactctgtgtgtgtattcaggaaaaatgaaaataaatttttaaaaattgggagtggaatgggcagattagggggaacaaagtcattttggtcatggaacatccatttgcttaaccaaggagacttgcttctatctgaggaatttcccacttagtagaaagaaacactcttccctgggaatgtttgtttctgtctctctcaatgctactctctttcatattctcatttgctcaccctttcacttagagccaccgttttctcatcccattctatgaacttatttccaaattctcctaactattcctgagttttgaagtatttgttttgtaccctctctgcttccggttttttgtttggttggcttttttggagatagggtcttgtgatgttgcccacactggtctcgagcccctgggctcaagtgatcctcccgcctcagcctcctaaatatctaggactacaggtgtgtgccaccatgcccagctccagttttgttggttgatttgtttaaattcagagatttaaaaacatcccagacaagacagtttgattatggagactgtccccaagcagattggtgtgctggtggctgctgtgcataacagattccctccagattggcttacaacagctacttcattctgtgggtcaggaatttggatagggctcagctgggtggtggttctcctggggtattctttggttgtggtcagatgtcttccagggcatcattcctatgaaggcttaatgaattaggcaagctgtccaagatggctcactcgtgtaatgacagttgacgttggctgtaggctgggaactcagctgggttgatgactggaggagcttatgtgtgtcgtctccggaatggcagcttcagaggagttgaacttaagtggtgattggcttcccccagagaaccaggcagaagctgtgttacctttttgagctcttagctcaggagtcacatagagtcacttctgtgacactgtgttgcatcaaagtagtcacaaacccactcagattcaagagaagggagcatggccctctccctgcaaccccctccccccccgccttgatgaaaggagtgacaaggtcacattggagaagagcttgtggggtgggagatattatagccatttttgggaaatatctgcataaaatgagtttatgcatacatgaaggactttattttcattggctttaagttgagggtttttgtttttgtttttgtattggagatgggttcttactatgttgcccaggctggtctcaaacccctgggctcaagtgatcctgttgcctcagcctcccaagtagctgggactacagctatgtgccagtgcacccagcttgttttttttaaattttaggatagataatggtacttctggctttatttaaataatttttttagggaaaccattgtatttatacatgcatatatttttatatatacaaatatgtatataaaagtatatgttttacattttcaatatatatataatatatacatatatgttatatacgtatatatattgcaccctactttaaaattgactgataacaaaattggtaattttgtataaaatgcccaactgtgcattattaataaaagtatgtgaatgactctaa

SEQ ID NO: 60 - protein, 1321 aa, Homosapiens; identical to SEQ ID NO: 58

SEQ ID NO: 61 - DNA, 5764 bp, Homosapiens
gttgttgaggctgaggactgactggggttctgagactccctgtcccggaccgcaggtttcttcacatataaaaatctattgtaaaaatacggaaaagaatggcagcggaaacgcagacactgaactttgggcctgaatggctccgagctctgtccagtggtgggagtattacatcccctcctctttctccagcattgccgaagtataaattagcagattatcgttacggcagagaagaaatgttagcacttttccttaaagacaacaagataccttcagaccttctggataaagaatttctgcctatcctccaggaggaaccccttccaccattggctctggtaccctttacagaagaagaacagagaaacttttccatgtctgtaaatagtgctgctgtcctgcgattgacaggacgaggaggaggaggaacagtggtgggggctcctagaggtcgaagttcttcaagagggcgaggcagaggcagaggtgaatgtggtttctaccaaagaagttttgatgaagtagagggtgtttttggtcgaggaggtggcagagaaatgcatagatcgcagagctgggaggaaaggggtgacagacgttttgaaaaaccaggacgaaaagatgtagggagaccaaattttgaggaaggtggaccaacatcagtagggagaaagcatgaatttatacgctcagaaagtgaaaattggcgcatctttagagaggaacaaaatggagaagatgaagatggaggttggcgactagctggatcaaggagggatggagagaggtggcgacctcacagtcctgatggccctcgttctgcaggctggcgggaacacatggaacgacgtcggaggtttgagtttgattttcgagatagagatgatgaacggggttaccgaagggttcgctctggcagtgggagcatagatgatgacagggatagcttgcccgaatggtgcttagaggatgctgaagaagaaatgggtacatttgactcatctggagcattcctttctctaaaaaaagtacagaaagagcctattccagaagagcaggagatggacttccggcctgtggacgaaggggaggagtgctctgactctgagggtagccataatgaagaggccaaagaacccgataagacaaataagaaagaaggagagaaaacagatagagtaggagttgaagctagtgaggaaactccccagacctcatcatcatctgctagaccaggtactccttcagaccatcagtctcaggaagcatcacagtttgagaggaaagatgaaccaaaaactgagcaaacggaaaaagctgaagaggagactcggatggaaaatagtctaccagccaaagtgcccagcagaggggatgaaatggttgctgatgtccagcagcccctgtcgcagattccttcagatacagcctctcctcttctcatacttccacctcctgttcccaatcctagtcctactctccggccagttgaaacaccagttgtaggtgctcctggtatgggcagtgtttccacagaacctgatgatgaagaaggtctcaaacatttggagcagcaagctgagaaaatggtggcttatctccaagacagtgcactagatgatgaaagattggcatcaaaactgcaagagcacagagctaaaggagtgtcgattccattgatgcatgaagcaatgcagaagtggtattacaaagatcctcagggagaaattcaaggtcccttcaataatcaggagatggcagaatggtttcaggcgggctattttactatgtctttattggtgaagagagcgtgtgatgaaagcttccaacctcttggcgatatcatgaaaatgtggggaagggttcccttttctccaggtccagctccccctcctcatatgggagagctggaccaggaacgactgaccaggcagcaagaactcacagccttataccagatgcagcacctgcagtaccagcagtttttaatacaacaacaatatgcacaggttttggcccaacagcagaaagcagcactgtcttcccagcagcagcagcagttggcacttcttcttcaacagtttcagaccttgaagatgagaatatctgatcagaacatcattccctcagtaactaggtctgtgtccgtgccagatactggctctatctgggagcttcagccaacagcttcacagcctacagtttgggaaggtggtagtgtatgggatcttcctctggacaccacgacaccaggccctgccctggaacagcttcagcagctagagaaggccaaagctgcaaagctagagcaagagagaagagaggcagaaatgagggcaaaacgggaagaggaagagcgaaagaggcaggaagaactccgaagacaacaggaggaaattcttcggcgacagcaggaagaagaaaggaaaaggcgagaggaagaagaacttgcccgaaggaaacaggaagaggctctgcgtcgccagcgggagcaagaaattgcattaaggcgacagcgagaagaggaagaaagacagcagcaagaagaagctcttagaagactggaagagaggagaagagaagaggaagaaaggcggaagcaggaagaattgttacgcaaacaggaagaggaggctgcaaaatgggcccgggaagaagaagaagcccagcgtcgattagaggagaaccggctgcggatggaagaggaggcagccagactccggcatgaggaagaagaacggaagagaaaggagctggaggtccagcggcagaaggagttaatgcgccagaggcagcagcagcaagaggctctccggaggttgcagcagcagcagcagcaacaacagctggcgcagatgaagcttccttcttcttcaacgtggggccagcagtccaatacaacagcatgtcagtcccaggccacgctgtcgttggctgaaatccaaaaactagaggaagaacgagaacggcagcttcgagaagagcaaaggcgccagcagagggagttgatgaaagctcttcagcagcagcagcaacagcaacagcagaaactctcaggttgggggaatgtcagcaaaccttcaggtaccacgaaatctcttctggagatccagcaggaagaggccaggcaaatgcaaaagcagcagcagcagcagcagcaacaccagcaaccaaacagagctcgtaacaatacgcattccaacctgcacaccagcattgggaattctgtttggggctctataaatactggtcctcctaaccagtgggcatctgacctagtcagtagtatttggagtaatgctgacactaaaaactccaacatgggattctgggatgatgcagtgaaagaggtgggacctaggaattcaacaaataaaaataaaaacaacgccagtctcagtaaatctgtaggtgtgtctaaccggcagaataagaaagtagaagaagaagaaaagttgctgaagctctttcagggagtaaataaagcccaagatggatttacgcagtggtgtgaacagatgcttcatgcccttaatacggcaaataacttggatgttcccacatttgtttctttcctgaaagaagtagaatctccttatgaggtccatgattatatcagggcctatttaggagatacttctgaggccaaggagtttgccaagcagttccttgagcgccgtgccaaacagaaagccaaccagcagcgtcagcagcagcagctgccacagcagcagcagcagcagccgccacagcagccgccacagcagccacaacagcaggactctgtgtgggggatgaaccacagtacactccattcagtatttcagaccaatcaaagcaacaaccaacaatccaattttgaggctgtgcagagtggcaagaagaagaaaaagcagaagatggtccgagcagatcccagtttattaggattttcagtcaatgcatcatcggagcgactcaacatgggtgaaatcgagacgttggatgactactgagcacctgccagtggactggccatccctctcctgtctgccgactatggagtctccacctttggacacaacacttactcaccatttactctttatcactctgcaacaaatcacagaaccgatcatctcaggctttttcttctggccctttgtgtccaagattctttaatccatttttgttggtgaacatctcagactatagataagtggactggaccctgtgtcttgggggtggcagttgggattactccccaacaaggctgattttaggcagcatgtgttcactgtgctgtgatttcatctactgtctcccagaaagtgtgttgggatcggccattagcagcttgctttctcttgtcactttttttcttctattttgttttttcttcttctttttccccccatcagggcaaatggtctaactggtgcaatcatgaagagagttaatggttaacagacattggccaataacaaaacaccccatggactgtgactcgagtatccaacaggcagtcagagctctcccggtctgaaagttgcattgccactgctaactttgggattgcatcagagaggccctgagtggggttgagatgaggttggtttggtttgatgttacacactcctcacctgttctttctgagtgtcctttctctgaaaggatttatgtttttcttcgttagatagtgacttctgagcaagctgatctcccctggcatgctccaacctgattggacaaaggaagctctatggcctgggagagagactattcttaatttttctttcttacaaaaactgatttttcccataaatatttttacttcagaggactaggaccattttgttttgggcccttctgctgaaaatttgtctcgtttaagaggcagctagaatctttaccatatgtatgaatttgtataatttcatttttggatagggataaacttttgcttctgataaaagcctggaatttcatctggtcctcagagcattgcgtgtgtgtcttgctgtagcccggaaaaggttttgtgtaaagattctgggatggcaagttgtttgccttttctgaaaagagaacatacagaacctgtccatctttaagaccttcatccatggaatctactatacaggaggatgcagtgggctggaggggatgggcgaaaatgggagcaggaagcctggcctggcttctggtcatggcctcctaaaaccttaaacttcaagtagaaatgtactcaagccctatttataaacaaatacttttcctgcctccaccaaacccctacagaacatcacctggaattgccactcacactgggttggagtcattgggcagctgtgcctgtgcgagaggtgctgtggtctgggcagcccctggaaaagcacctttgctgcctgtcattgttgcctgaagaaggctggagttgctctgagagcagtttgggtttggagtattatatttggcttctatttttattattttggatcaccattctccctatcccttcttgcctccctcccttctaaacatgtgtaataactatacagagactgctacaaaattgtatatagtttttggatcaaatagcatgaggggagaggaaaccattaaaagttggggctcctactctcctttgctttgtaaattcaaaagttgggggtgggtaagagggatagttaaaatgtttacaaaactttaggctccctcggaacttttgccagtgtggaggaaaataaaaaagaacttaaataaaatctgattgtattct

SEQ ID NO: 62 - protein, 1299 aa, Homosapiens; identical to SEQ ID NO: 2

SEQ ID NO: 63 - DNA, 7715 bp, Homosapiens
gttgttgaggctgaggactgactggggttctgagactccctgtcccggaccgcaggtttcttcacatataaaaatctattgtaaaaatacggaaaagaatggcagcggaaacgcagacactgaactttgggcctgaatggctccgagctctgtccagtggtgggagtattacatcccctcctctttctccagcattgccgaagtataaattagcagattatcgttacggcagagaagaaatgttagcacttttccttaaagacaacaagataccttcagaccttctggataaagaatttctgcctatcctccaggaggaaccccttccaccattggctctggtaccctttacagaagaagaacagagaaacttttccatgtctgtaaatagtgctgctgtcctgcgattgacaggacgaggaggaggaggaacagtggtgggggctcctagaggtcgaagttcttcaagagggcgaggcagaggcagaggtgaatgtggtttctaccaaagaagttttgatgaagtagagggtgtttttggtcgaggaggtggcagagaaatgcatagatcgcagagctgggaggaaaggggtgacagacgttttgaaaaaccaggacgaaaagatgtagggagaccaaattttgaggaaggtggaccaacatcagtagggagaaagcatgaatttatacgctcagaaagtgaaaattggcgcatctttagagaggaacaaaatggagaagatgaagatggaggttggcgactagctggatcaaggagggatggagagaggtggcgacctcacagtcctgatggccctcgttctgcaggctggcgggaacacatggaacgacgtcggaggtttgagtttgattttcgagatagagatgatgaacggggttaccgaagggttcgctctggcagtgggagcatagatgatgacagggatagcttgcccgaatggtgcttagaggatgctgaagaagaaatgggtacatttgactcatctggagcattcctttctctaaaaaaagtacagaaagagcctattccagaagagcaggagatggacttccggcctgtggacgaaggggaggagtgctctgactctgagggtagccataatgaagaggccaaagaacccgataagacaaataagaaagaaggagagaaaacagatagagtaggagttgaagctagtgaggaaactccccagacctcatcatcatctgctagaccaggtactccttcagaccatcagtctcaggaagcatcacagtttgagaggaaagatgaaccaaaaactgagcaaacggaaaaagctgaagaggagactcggatggaaaatagtctaccagccaaagtgcccagcagaggggatgaaatggttgctgatgtccagcagcccctgtcgcagattccttcagatacagcctctcctcttctcatacttccacctcctgttcccaatcctagtcctactctccggccagttgaaacaccagttgtaggtgctcctggtatgggcagtgtttccacagaacctgatgatgaagaaggtctcaaacatttggagcagcaagctgagaaaatggtggcttatctccaagacagtgcactagatgatgaaagattggcatcaaaactgcaagagcacagagctaaaggagtgtcgattccattgatgcatgaagcaatgcagaagtggtattacaaagatcctcagggagaaattcaaggtcccttcaataatcaggagatggcagaatggtttcaggcgggctattttactatgtctttattggtgaagagagcgtgtgatgaaagcttccaacctcttggcgatatcatgaaaatgtggggaagggttcccttttctccaggtccagctccccctcctcatatgggagagctggaccaggaacgactgaccaggcagcaagaactcacagccttataccagatgcagcacctgcagtaccagcagtttttaatacaacaacaatatgcacaggttttggcccaacagcagaaagcagcactgtcttcccagcagcagcagcagttggcacttcttcttcaacagtttcagaccttgaagatgagaatatctgatcagaacatcattccctcagtaactaggtctgtgtccgtgccagatactggctctatctgggagcttcagccaacagcttcacagcctacagtttgggaaggtggtagtgtatgggatcttcctctggacaccacgacaccaggccctgccctggaacagcttcagcagctagagaaggccaaagctgcaaagctagagcaagagagaagagaggcagaaatgagggcaaaacgggaagaggaagagcgaaagaggcaggaagaactccgaagacaacaggaggaaattcttcggcgacagcaggaagaagaaaggaaaaggcgagaggaagaagaacttgcccgaaggaaacaggaagaggctctgcgtcgccagcgggagcaagaaattgcattaaggcgacagcgagaagaggaagaaagacagcagcaagaagaagctcttagaagactggaagagaggagaagagaagaggaagaaaggcggaagcaggaagaattgttacgcaaacaggaagaggaggctgcaaaatgggcccgggaagaagaagaagcccagcgtcgattagaggagaaccggctgcggatggaagaggaggcagccagactccggcatgaggaagaagaacggaagagaaaggagctggaggtccagcggcagaaggagttaatgcgccagaggcagcagcagcaagaggctctccggaggttgcagcagcagcagcagcaacaacagctggcgcagatgaagcttccttcttcttcaacgtggggccagcagtccaatacaacagcatgtcagtcccaggccacgctgtcgttggctgaaatccaaaaactagaggaagaacgagaacggcagcttcgagaagagcaaaggcgccagcagagggagttgatgaaagctcttcagcagcagcagcaacagcaacagcagaaactctcaggttgggggaatgtcagcaaaccttcaggtaccacgaaatctcttctggagatccagcaggaagaggccaggcaaatgcaaaagcagcagcagcagcagcagcaacaccagcaaccaaacagagctcgtaacaatacgcattccaacctgcacaccagcattgggaattctgtttggggctctataaatactggtcctcctaaccagtgggcatctgacctagtcagtagtatttggagtaatgctgacactaaaaactccaacatgggattctgggatgatgcagtgaaagaggtgggacctaggaattcaacaaataaaaataaaaacaacgccagtctcagtaaatctgtaggtgtgtctaaccggcagaataagaaagtagaagaagaagaaaagttgctgaagctctttcagggagtaaataaagcccaagatggatttacgcagtggtgtgaacagatgcttcatgcccttaatacggcaaataacttggatgttcccacatttgtttctttcctgaaagaagtagaatctccttatgaggtccatgattatatcagggcctatttaggagatacttctgaggccaaggagtttgccaagcagttccttgagcgccgtgccaaacagaaagccaaccagcagcgtcagcagcagcagctgccacagcagcagcagcagcagccgccacagcagccgccacagcagccacaacagcaggactctgtgtgggggatgaaccacagtacactccattcagtatttcagaccaatcaaagcaacaaccaacaatccaattttgaggctgtgcagagtggcaagaagaagaaaaagcagaagatggtccgagcagatcccagtttattaggattttcagtcaatgcatcatcggagcgactcaacatgggtgaaatcgagacgttggatgactactgagcacctgccagtggactggccatccctctcctgtctgccgactatggagtctccacctttggacacaacacttactcaccatttactctttatcactctgcaacaaatcacagaaccgatcatctcaggctttttcttctggccctttgtgtccaagattctttaatccatttttgttggtgaacatctcagactatagataagtggactggaccctgtgtcttgggggtggcagttgggattactccccaacaaggctgattttaggcagcatgtgttcactgtgctgtgatttcatctactgtctcccagaaagtgtgttgggatcggccattagcagcttgctttctcttgtcactttttttcttctattttgttttttcttcttctttttccccccatcagggcaaatggtctaactggtgcaatcatgaagagagttaatggttaacagacattggccaataacaaaacaccccatggactgtgactcgagtatccaacaggcagtcagagctctcccggtctgaaagttgcattgccactgctaactttgggattgcatcagagaggccctgagtggggttgagatgaggttggtttggtttgatgttacacactcctcacctgttctttctgagtgtcctttctctgaaaggatttatgtttttcttcgttagatagtgacttctgagcaagctgatctcccctggcatgctccaacctgattggacaaaggaagctctatggcctgggagagagactattcttaatttttctttcttacaaaaactgatttttcccataaatatttttacttcagaggactaggaccattttgttttgggcccttctgctgaaaatttgtctcgtttaagaggcagctagaatctttaccatatgtatgaatttgtataatttcatttttggatagggataaacttttgcttctgataaaagcctggaatttcatctggtcctcagagcattgcgtgtgtgtcttgctgtagcccggaaaaggttttgtgtaaagattctgggatggcaagttgtttgccttttctgaaaagagaacatacagaacctgtccatctttaagaccttcatccatggaatctactatacaggaggatgcagtgggctggaggggatgggcgaaaatgggagcaggaagcctggcctggcttctggtcatggcctcctaaaaccttaaacttcaagtagaaatgtactcaagccctatttataaacaaatacttttcctgcctccaccaaacccctacagaacatcacctggaattgccactcacactgggttggagtcattgggcagctgtgcctgtgcgagaggtgctgtggtctgggcagcccctggaaaagcacctttgctgcctgtcattgttgcctgaagaaggctggagttgctctgagagcagtttgggtttggagtattatatttggcttctatttttattattttggatcaccattctccctatcccttcttgcctccctcccttctaaacatgtgtaataactatacagagactgctacaaaattgtatatagtttttggatcaaatagcatgaggggagaggaaaccattaaaagttggggctcctactctcctttgctttgtaaattcaaaagttgggggtgggtaagagggatagttaaaatgtttacaaaactttaggctccctcggaacttttgccagtgtggaggaaaataaaaaagaacttaaataaaatctgattgtattctatctgagtgcacctcttgtactcacctttatggaggctgagttctgcactaaactgttcctcttggtaccatggaaaagctccaagcacccaagacatggaggcagccatggcttctttctctgccagaccacgtagcactggctggttctgtatttgagaatgtagaggtcaaggcagatgtcggtaagtttgaccaaatatcttttctctttttgactctccctttctgctaacatgtggatcagctcctgccctcataccgcagacacacccactctgaacacacccctccagagcttgcccacaccttcccaactagactctgtgtgtgtattcaggaaaaatgaaaataaatttttaaaaattgggagtggaatgggcagattagggggaacaaagtcattttggtcatggaacatccatttgcttaaccaaggagacttgcttctatctgaggaatttcccacttagtagaaagaaacactcttccctgggaatgtttgtttctgtctctctcaatgctactctctttcatattctcatttgctcaccctttcacttagagccaccgttttctcatcccattctatgaacttatttccaaattctcctaactattcctgagttttgaagtatttgttttgtaccctctctgcttccggttttttgtttggttggcttttttggagatagggtcttgtgatgttgcccacactggtctcgagcccctgggctcaagtgatcctcccgcctcagcctcctaaatatctaggactacaggtgtgtgccaccatgcccagctccagttttgttggttgatttgtttaaattcagagatttaaaaacatcccagacaagacagtttgattatggagactgtccccaagcagattggtgtgctggtggctgctgtgcataacagattccctccagattggcttacaacagctacttcattctgtgggtcaggaatttggatagggctcagctgggtggtggttctcctggggtattctttggttgtggtcagatgtcttccagggcatcattcctatgaaggcttaatgaattaggcaagctgtccaagatggctcactcgtgtaatgacagttgacgttggctgtaggctgggaactcagctgggttgatgactggaggagcttatgtgtgtcgtctccggaatggcagcttcagaggagttgaacttaagtggtgattggcttcccccagagaaccaggcagaagctgtgttacctttttgagctcttagctcaggagtcacatagagtcacttctgtgacactgtgttgcatcaaagtagtcacaaacccactcagattcaagagaagggagcatggccctctccctgcaaccccctccccccccgccttgatgaaaggagtgacaaggtcacattggagaagagcttgtggggtgggagatattatagccatttttgggaaatatctgcataaaatgagtttatgcatacatgaaggactttattttcattggctttaagttgagggtttttgtttttgtttttgtattggagatgggttcttactatgttgcccaggctggtctcaaacccctgggctcaagtgatcctgttgcctcagcctcccaagtagctgggactacagctatgtgccagtgcacccagcttgttttttttaaattttaggatagataatggtacttctggctttatttaaataatttttttagggaaaccattgtatttatacatgcatatatttttatatatacaaatatgtatataaaagtatatgttttacattttcaatatatatataatatatacatatatgttatatacgtatatatattgcaccctactttaaaattgactgataacaaaattggtaattttgtataaaatgcccaactgtgcattattaataaaagtatgtgaatgactctaa

SEQ ID NO: 64 - protein, 1299 aa, Homosapiens; identical to SEQ ID NO: 2

SEQ ID NO: 65 - DNA, 3060 bp, Homosapiens
agtccaagaagagaacctacaaactagacttgtagattaaaattatctgatcaaaaaggcagactctgtaaatttccttaagacctaccttggcataaaggctgacccagcaaaagaactgagaaatacagcctgagatggacagcagtaattgcaaagttattgctcctctcctaagtcaaagataccggaggatggtcaccaaggatggccacagcacacttcaaatggatggcgctcaaagaggtcttgcatatcttcgagatgcttggggaatcctaatggacatgcgctggcgttggatgatgttggtcttttctgcttcttttgttgtccactggcttgtctttgcagtgctctggtatgttctggctgagatgaatggtgatctggaactagatcatgatgccccacctgaaaaccacactatctgtgtcaagtatatcaccagtttcacagctgcattctccttctccctggagacacaactcacaattggttatggtaccatgttccccagtggtgactgtccaagtgcaatcgccttacttgccatacaaatgctcctaggcctcatgctagaggcttttatcacaggtgcttttgtggcgaagattgcccggccaaaaaatcgagctttttcaattcgctttactgacacagcagtagtagctcacatggatggcaaacctaatcttatcttccaagtggccaacacccgacctagccctctaaccagtgtccgggtctcagctgtactctatcaggaaagagaaaatggcaaactctaccagaccagtgtggatttccaccttgatggcatcagttctgacgaatgtccattcttcatctttccactaacgtactatcactccattacaccatcaagtcctctggctactctgctccagcatgaaaatccttctcactttgaattagttgtattcctttcagcaatgcaggagggcactggagaaatatgccaaaggaggacatcctacctaccgtctgaaatcatgttacatcactgttttgcatctctgttgacccgaggttccaaaggtgaatatcaaatcaagatggagaattttgacaagactgtccctgaatttccaactcctctggtttctaaaagcccaaacaggactgacctggatatccacatcaatggacaaagcattgacaattttcagatctctgaaacaggactgacagaataagacttatccattttttaatgtattaaatacacccagccagttatgcagctactttttctttactgtatctcatgttttcttttttcaatgctaattatagctctctacatcacggtaatcatgcctatgcctacataagaatggctgagctaacaatacacattctggaaacataacactctacattacaaagtttgttacctgctgaaatcaatgtaactcaacttgacagacacttatacagaaatgttgctggtgaatttataagaatgtggtatgatactagtaatgaaggcaaaatggacagtgaagtttaacacaactgaactctaagaaaatcaaccattaatctctcattttcatctgcaaattgaagcaacagtttagtttcaaacctagctccctgggtggaatgacgacttcactatacttagtgaatatcctttaagagctgggatttttttcaagacaacaaagatcattcatttggttctttatactatgaaacttgagtaagtattacctccttaatttttaacaactaagaacaaaaattaacgagaaaaacaacaaagtacagatttatacataaacctaaaagcatttgaacatgacacccgaacacatacatatatgttcacttatttgtggcagaaggtgatcagataagctccagcccaaatggaacctgtggggtggtattttgcattgcaaggagacgcaaaattttattttaaaactgtcctccataataatcaaacggtgattcatctaaatgacttctagcaacctaagtaaaaacattcccctcctatgtatgattcatttgatcatataaaacatcatgatggctctaattcataaatacaaaaatatatttaagtctttatagatataaagctttacttagatataacttgagtgagtagggaaaaaaatctacagtagataaagcaaaagataattaggcaacaaagcattttcaaactcaaattcctgtttccaacttcaaatagttttttctataaacacaaaatcagtgtttattcaccagtaggaggttggactagatgaactctattatttctttctaaatctaatagtctataaaaattatgtttcctctgttttttattttatctatgctaaaatgagccctttcccttatgtccagtttaagatgatcatttgcatgattttcatttcaataaaaaaaagagaaactgtccttaaaacaaaacaaaaaccaaaaaagtcaccctatcaggtttcaaacagatttgtggctgttcttttctgaaatttcccttattcaggtttctgtgggaaaaatgaaagattaaccttccccactggtgatgacctaggcaggaatcatctcttgaaataaatactagctgagtaaaggcaagcaggtgtgaagagcagggctcagcagcaagtcacatttttctactatttgaccaaaaggaaaagaaaataaagaagaactctggagtggtctaagactgataatagcagaagaatatcaagaacacagaaacttaattattgtgaacttttgctgtttgaaaatcttagacattcattcttaagtagaaatcagaccaacagattttcccaacccaagactattgtaacacataaagacagcaagaattcttatttctataataaattaacaagattcacctaacctttgaaaataaagtagtattgaagacttacatggtatgttttttcctaaaggcactacatcacttacacagttcaccctctcgcttgttaagtgaagctgcccaaggtgacataagtgaatgagtaaaacctgagatctaag

SEQ ID NO: 66 - protein, 360 aa, Homosapiens
MDSSNCKVIAPLLSQRYRRMVTKDGHSTLQMDGAQRGLAYLRDAWGILMDMRWRWMMLVFSASFVVHWLVFAVLWYVLAEMNGDLELDHDAPPENHTICVKYITSFTAAFSFSLETQLTIGYGTMFPSGDCPSAIALLAIQMLLGLMLEAFITGAFVAKIARPKNRAFSIRFTDTAVVAHMDGKPNLIFQVANTRPSPLTSVRVSAVLYQERENGKLYQTSVDFHLDGISSDECPFFIFPLTYYHSITPSSPLATLLQHENPSHFELVVFLSAMQEGTGEICQRRTSYLPSEIMLHHCFASLLTRGSKGEYQIKMENFDKTVPEFPTPLVSKSPNRTDLDIHINGQSIDNFQISETGLTE

SEQ ID NO: 67 - DNA, 2824 bp, Homosapiens
agtccaagaagagaacctacaaactagacttgtagattaaaattatctgatcaaaaaggcagactctgtaaatttccttaagacctaccttggcataaaggctgacccagcaaaagaactgagaaatacagcctgagatggacagcagtaattgcaaagttattgctcctctcctaagtcaaagataccggaggatggtcaccaaggatggccacagcacacttcaaatggatggcgctcaaagaggtcttgcatatcttcgagatgcttggggaatcctaatggacatgcgctggcgttggatgatgttggtcttttctgcttcttttgttgtccactggcttgtctttgcagtgctctggtgcttttgtggcgaagattgcccggccaaaaaatcgagctttttcaattcgctttactgacacagcagtagtagctcacatggatggcaaacctaatcttatcttccaagtggccaacacccgacctagccctctaaccagtgtccgggtctcagctgtactctatcaggaaagagaaaatggcaaactctaccagaccagtgtggatttccaccttgatggcatcagttctgacgaatgtccattcttcatctttccactaacgtactatcactccattacaccatcaagtcctctggctactctgctccagcatgaaaatccttctcactttgaattagttgtattcctttcagcaatgcaggagggcactggagaaatatgccaaaggaggacatcctacctaccgtctgaaatcatgttacatcactgttttgcatctctgttgacccgaggttccaaaggtgaatatcaaatcaagatggagaattttgacaagactgtccctgaatttccaactcctctggtttctaaaagcccaaacaggactgacctggatatccacatcaatggacaaagcattgacaattttcagatctctgaaacaggactgacagaataagacttatccattttttaatgtattaaatacacccagccagttatgcagctactttttctttactgtatctcatgttttcttttttcaatgctaattatagctctctacatcacggtaatcatgcctatgcctacataagaatggctgagctaacaatacacattctggaaacataacactctacattacaaagtttgttacctgctgaaatcaatgtaactcaacttgacagacacttatacagaaatgttgctggtgaatttataagaatgtggtatgatactagtaatgaaggcaaaatggacagtgaagtttaacacaactgaactctaagaaaatcaaccattaatctctcattttcatctgcaaattgaagcaacagtttagtttcaaacctagctccctgggtggaatgacgacttcactatacttagtgaatatcctttaagagctgggatttttttcaagacaacaaagatcattcatttggttctttatactatgaaacttgagtaagtattacctccttaatttttaacaactaagaacaaaaattaacgagaaaaacaacaaagtacagatttatacataaacctaaaagcatttgaacatgacacccgaacacatacatatatgttcacttatttgtggcagaaggtgatcagataagctccagcccaaatggaacctgtggggtggtattttgcattgcaaggagacgcaaaattttattttaaaactgtcctccataataatcaaacggtgattcatctaaatgacttctagcaacctaagtaaaaacattcccctcctatgtatgattcatttgatcatataaaacatcatgatggctctaattcataaatacaaaaatatatttaagtctttatagatataaagctttacttagatataacttgagtgagtagggaaaaaaatctacagtagataaagcaaaagataattaggcaacaaagcattttcaaactcaaattcctgtttccaacttcaaatagttttttctataaacacaaaatcagtgtttattcaccagtaggaggttggactagatgaactctattatttctttctaaatctaatagtctataaaaattatgtttcctctgttttttattttatctatgctaaaatgagccctttcccttatgtccagtttaagatgatcatttgcatgattttcatttcaataaaaaaaagagaaactgtccttaaaacaaaacaaaaaccaaaaaagtcaccctatcaggtttcaaacagatttgtggctgttcttttctgaaatttcccttattcaggtttctgtgggaaaaatgaaagattaaccttccccactggtgatgacctaggcaggaatcatctcttgaaataaatactagctgagtaaaggcaagcaggtgtgaagagcagggctcagcagcaagtcacatttttctactatttgaccaaaaggaaaagaaaataaagaagaactctggagtggtctaagactgataatagcagaagaatatcaagaacacagaaacttaattattgtgaacttttgctgtttgaaaatcttagacattcattcttaagtagaaatcagaccaacagattttcccaacccaagactattgtaacacataaagacagcaagaattcttatttctataataaattaacaagattcacctaacctttgaaaataaagtagtattgaagacttacatggtatgttttttcctaaaggcactacatcacttacacagttcaccctctcgcttgttaagtgaagctgcccaaggtgacataagtgaatgagtaaaacctgagatctaag

SEQ ID NO: 68 - protein, 94 aa, Homosapiens
MDSSNCKVIAPLLSQRYRRMVTKDGHSTLQMDGAQRGLAYLRDAWGILMDMRWRWMMLVFSASFVVHWLVFAVLWCFCGEDCPAKKSSFFNSLY

SEQ ID NO: 69 - DNA, 2946 bp, Homosapiens
agtccaagaagagaacctacaaactagacttgtagattaaaattatctgatcaaaaaggcagactctgtaaatttccttaagacctaccttggcataaaggctgacccagcaaaagaactgagaaatacagcctgagatggacagcagtaattgcaaagttattgctcctctcctaagtcaaagataccggaggatggtcaccaaggatggccacagcacacttcaaatggatggcgctcaaagaggtcttgcatatcttcgagatgcttggggaatcctaatggacatgcgctggcgttggatgatgttggtcttttctgcttcttttgttgtccactggcttgtctttgcagtgctctggtatgttctggctgagatgaatggtgatctggaactagatcatgatgccccacctgaaaaccacactatctgtgtcaagtatatcaccagtttcacagctgcattctccttctccctggagacacaactcacaattggttatggtaccatgttccccagtggtgactgtccaagtgcaatcgccttacttgccatacaaatgctcctaggcctcatgctagaggcttttatcacaggtgcttttgtggcgaagattgcccggccaaaaaatcgagctttttcaattcgctttactgacacagcagtagtagctcacatggatggcaaacctaatcttatcttccaagtggccaacacccgacctagccctctaaccagtgtccgggtctcagctgtactctatcaggaaagagaaaatggcaaactctaccagaccagtgtggatttccaccttgatggcatcagttctgacgaatgtccattcttcatctttccactaacgtactatcactccattacaccatcaagtcctctggctactctgctccagcatgaaaatccttctcactttgaattagttgtattcctttcagcaatgcaggagggcactggagaaatatgccaaaggaggacatcctacctaccgtctgaaatcatgttacatcactgttttgcatctctgttgacccgaggttccaaaggtgaatatcaaatcaagatggagaattttgacaagactgtccctgaatttccaactcctctggtttctaaaagcccaaacaggactgacctggatatccacatcaatggacaaagcattgacaattttcagatctctgaaacaggactgacagaataagacttatccattttttaatgtattaaatacacccagccagttatgcagctactttttctttactgtatctcatgttttcttttttcaatgctaattatagctctctacatcacggtaatcatgcctatgcctacataagaatggctgagctaacaatacacattctggaaacataacactctacattacaaagtttgttacctgctgaaatcaatgtaactcaacttgacagacacttatacagaaatgttgctggtgaatttataagaatgtggtatgatactagtaatgaaggcaaaatggacagtgaagtttaacacaactgaactctaagaaaatcaaccattaatctctcattttcatctgcaaattgaagcaacagtttagtttcaaacctagctccctgggtggaatgacgacttcactatacttagtgaatatcctttaagagctgggatttttttcaagacaacaaagatcattcatttggttctttatactatgaaacttgagtaagtattacctccttaatttttaacaactaagaacaaaaattaacgagaaaaacaacaaagtacagatttatacataaacctaaaagcatttgaacatgacacccgaacacatacatatatgttcacttatttgtggcagaaggtgatcagataagctccagcccaaatggaacctgtggggtggtattttgcattgcaaggagacgcaaaattttattttaaaactgtcctccataataatcaaacggtgattcatctaaatgacttctagcaacctaagtaaaaacattcccctcctatgtatgattcatttgatcatataaaacatcatgatggctctaattcataaatacaaaaatatatttaagtctttatagatataaagctttacttagatataacttgagtgagtagggaaaaaaatctacagtagataaagcaaaagataattaggcaacaaagcattttcaaactcaaattcctgtttccaacttcaaatagttttttctataaacacaaaatcagtgtttattcaccagtaggaggttggactagatgaactctattatttctttctaaatctaatagtctataaaaattatgtttcctctgttttttattttatctatgctaaaatgagccctttcccttatgtccagtttaagatgatcatttgcatgattttcatttcaataaaaaaaagagaaactgtccttaaaacaaaacaaaaaccaaaaaagtcaccctatcaggtttcaaacagatttgtggctgttcttttctgaaatttcccttattcaggtttctgtgggaaaaatgaaagattaaccttccccactggtgatgacctaggcaggaatcatctcttgaaataaatactagctgagtaaaggcaagcaggtgtgaagagcagggctcagcagcaagtcacatttttctactatttgaccaaaaggaaaagaaaataaagaagaactctggagtggtctaagactgataatagcagaagaatatcaagaacacagaaacttaattattgtgaacttttgctgtttgaaaatcttagacattcattcttaagtagaaatcagaccaacagattttcccaacccaagactattgtaacacataaagacagcaagaattcttatttctataataaattaacaagattcacctaacctttgaaaataaagtagtattgaagactt

SEQ ID NO: 70 - protein, 360 aa, Homosapiens; identical to SEQ ID NO: 66

SEQ ID NO: 71 - DNA, 2710 bp, Homosapiens
agtccaagaagagaacctacaaactagacttgtagattaaaattatctgatcaaaaaggcagactctgtaaatttccttaagacctaccttggcataaaggctgacccagcaaaagaactgagaaatacagcctgagatggacagcagtaattgcaaagttattgctcctctcctaagtcaaagataccggaggatggtcaccaaggatggccacagcacacttcaaatggatggcgctcaaagaggtcttgcatatcttcgagatgcttggggaatcctaatggacatgcgctggcgttggatgatgttggtcttttctgcttcttttgttgtccactggcttgtctttgcagtgctctggtgcttttgtggcgaagattgcccggccaaaaaatcgagctttttcaattcgctttactgacacagcagtagtagctcacatggatggcaaacctaatcttatcttccaagtggccaacacccgacctagccctctaaccagtgtccgggtctcagctgtactctatcaggaaagagaaaatggcaaactctaccagaccagtgtggatttccaccttgatggcatcagttctgacgaatgtccattcttcatctttccactaacgtactatcactccattacaccatcaagtcctctggctactctgctccagcatgaaaatccttctcactttgaattagttgtattcctttcagcaatgcaggagggcactggagaaatatgccaaaggaggacatcctacctaccgtctgaaatcatgttacatcactgttttgcatctctgttgacccgaggttccaaaggtgaatatcaaatcaagatggagaattttgacaagactgtccctgaatttccaactcctctggtttctaaaagcccaaacaggactgacctggatatccacatcaatggacaaagcattgacaattttcagatctctgaaacaggactgacagaataagacttatccattttttaatgtattaaatacacccagccagttatgcagctactttttctttactgtatctcatgttttcttttttcaatgctaattatagctctctacatcacggtaatcatgcctatgcctacataagaatggctgagctaacaatacacattctggaaacataacactctacattacaaagtttgttacctgctgaaatcaatgtaactcaacttgacagacacttatacagaaatgttgctggtgaatttataagaatgtggtatgatactagtaatgaaggcaaaatggacagtgaagtttaacacaactgaactctaagaaaatcaaccattaatctctcattttcatctgcaaattgaagcaacagtttagtttcaaacctagctccctgggtggaatgacgacttcactatacttagtgaatatcctttaagagctgggatttttttcaagacaacaaagatcattcatttggttctttatactatgaaacttgagtaagtattacctccttaatttttaacaactaagaacaaaaattaacgagaaaaacaacaaagtacagatttatacataaacctaaaagcatttgaacatgacacccgaacacatacatatatgttcacttatttgtggcagaaggtgatcagataagctccagcccaaatggaacctgtggggtggtattttgcattgcaaggagacgcaaaattttattttaaaactgtcctccataataatcaaacggtgattcatctaaatgacttctagcaacctaagtaaaaacattcccctcctatgtatgattcatttgatcatataaaacatcatgatggctctaattcataaatacaaaaatatatttaagtctttatagatataaagctttacttagatataacttgagtgagtagggaaaaaaatctacagtagataaagcaaaagataattaggcaacaaagcattttcaaactcaaattcctgtttccaacttcaaatagttttttctataaacacaaaatcagtgtttattcaccagtaggaggttggactagatgaactctattatttctttctaaatctaatagtctataaaaattatgtttcctctgttttttattttatctatgctaaaatgagccctttcccttatgtccagtttaagatgatcatttgcatgattttcatttcaataaaaaaaagagaaactgtccttaaaacaaaacaaaaaccaaaaaagtcaccctatcaggtttcaaacagatttgtggctgttcttttctgaaatttcccttattcaggtttctgtgggaaaaatgaaagattaaccttccccactggtgatgacctaggcaggaatcatctcttgaaataaatactagctgagtaaaggcaagcaggtgtgaagagcagggctcagcagcaagtcacatttttctactatttgaccaaaaggaaaagaaaataaagaagaactctggagtggtctaagactgataatagcagaagaatatcaagaacacagaaacttaattattgtgaacttttgctgtttgaaaatcttagacattcattcttaagtagaaatcagaccaacagattttcccaacccaagactattgtaacacataaagacagcaagaattcttatttctataataaattaacaagattcacctaacctttgaaaataaagtagtattgaagactt

SEQ ID NO: 72 - protein, 94 aa, Homosapiens; identical to SEQ ID NO: 68

SEQ ID NO: 73 - DNA, 1270 bp, Homosapiens
agtccaagaagagaacctacaaactagacttgtagattaaaattatctgatcaaaaaggcagactctgtaaatttccttaagacctaccttggcataaaggctgacccagcaaaagaactgagaaatacagcctgagatggacagcagtaattgcaaagttattgctcctctcctaagtcaaagataccggaggatggtcaccaaggatggccacagcacacttcaaatggatggcgctcaaagaggtcttgcatatcttcgagatgcttggggaatcctaatggacatgcgctggcgttggatgatgttggtcttttctgcttcttttgttgtccactggcttgtctttgcagtgctctggtatgttctggctgagatgaatggtgatctggaactagatcatgatgccccacctgaaaaccacactatctgtgtcaagtatatcaccagtttcacagctgcattctccttctccctggagacacaactcacaattggttatggtaccatgttccccagtggtgactgtccaagtgcaatcgccttacttgccatacaaatgctcctaggcctcatgctagaggcttttatcacaggtgcttttgtggcgaagattgcccggccaaaaaatcgagctttttcaattcgctttactgacacagcagtagtagctcacatggatggcaaacctaatcttatcttccaagtggccaacacccgacctagccctctaaccagtgtccgggtctcagctgtactctatcaggaaagagaaaatggcaaactctaccagaccagtgtggatttccaccttgatggcatcagttctgacgaatgtccattcttcatctttccactaacgtactatcactccattacaccatcaagtcctctggctactctgctccagcatgaaaatccttctcactttgaattagttgtattcctttcagcaatgcaggagggcactggagaaatatgccaaaggaggacatcctacctaccgtctgaaatcatgttacatcactgttttgcatctctgttgacccgaggttccaaaggtgaatatcaaatcaagatggagaattttgacaagactgtccctgaatttccaactcctctggtttctaaaagcccaaacaggactgacctggatatccacatcaatggacaaagcattgacaattttcagatctctgaaacaggactgacagaataagacttatccattttttaatgtattaaatacacccagccagttatgcagct

SEQ ID NO: 74 - protein, 360 aa, Homosapiens; identical to SEQ ID NO: 66

SEQ ID NO: 75 - DNA, 5219 bp, Homosapiens
accagcagtttttaatacagtaagaagagtaatgcagtaggatgtactgcagcatgaaaaaggactttaaatagaatctgctctcaagtctcaccttttacagtagagaggactaacggcttatatggcacttcagtcacccagctagtggcgtcttgccaccataccttctaattttagtgttgtcatttatttatttatttatttatttttgagacagagcctcactctgtcatccaggctggagtgcagtggcatgatctcggctcactgcaacctctgccttcctggttccattgattctcgtgcttcagcctcctgagtagctgggactacaggcgtgtgccaccacgcccagcctatttttgtatttttagtagagatggggttttactgtgttggcgaggctggcctcgaactcccagcctcaagtgatctgcctgcctcgcctcccaaagtgctgggattacaggcatgaaccaccactcctggcttatcttacttttaaataccagaagtttagaagatgacacataactttaattttgtaagctctttagtttctaagtgcctcctgagtggctcagctttgaatgccacagaggaaaaaaaatatatatgtatataagcgagagggtgggaaagaagttaaagttaattattttaggagtggtgtggaatgatggcaaagtcagtcaggttttgttatgtcctttttgtagaagaaataagatttgctgttcttgtggtgcagaggttggcaaagtctgacctttgggctaaatctggcctgctctctatttttatatttataagcaaagtgttactgaaacagacacacctgttggtttgtaggatgtatattgctgcttttgccttatgatggcagaattgagtagttgcaacagagagtatatgagctgcatagatgaaactatttactctctggcccattacaaaagtttaaccctgatctagtgaagaaaaattacctaaatttttccaagttgaagacgatcaatgtatgaatttttatagaagtgttacattttttacaaagggtacgtcatatggttaaagctactaatttgaatctgtttcatttttcatttgatttctgataaaaggttatctttggagtttaccaatttttgacattcgtgattttaaaaatattttctctgaatagaccactttgcactgaattgtgaatttttttgctatcctctttcactcggaaacacgccatctatgagttcagttctttctagaatgaagcatagaattttctatgtgtctattatcataatgaagaattataaaatatatttgatagctatttctaataatgtctcctggggggctttgaattgaactttgtctttcagcatctcagccatgtgaactaagtgtggattgacaggttatacttttttttttactttttgaagacaacaatatgcacaggttttggcccaacagcagaaagcagcactgtcttcccagcagcagcagcagttggcacttcttcttcaacagtttcagaccttgaagatgagaatatctgatcagaacatcattccctcagtaactaggtctgtgtccgtgccagatactggctctatctgggagcttcagccaacagcttcacagcctacagtttgggaaggtggtagtgtatgggatcttcctctggacaccacgacaccaggccctgccctggaacagcttcagcagctagagaaggccaaagctgcaaagctagagcaagagagaagagaggcagaaatgagggcaaaacgggaagaggaagagcgaaagaggcaggaagaactccgaagacaacaggaggaaattcttcggcgacagcaggaagaagaaaggaaaaggcgagaggaagaagaacttgcccgaaggaaacaggaagaggctctgcgtcgccagcgggagcaagaaattgcattaaggcgacagcgagaagaggaagaaagacagcagcaagaagaagctcttagaagactggaagagaggagaagagaagaggaagaaaggcggaagcaggaagaattgttacgcaaacaggaagaggaggctgcaaaatgggcccgggaagaagaagaagcccagcgtcgattagaggagaaccggctgcggatggaagaggaggcagccagactccggcatgaggaagaagaacggaagagaaaggagctggaggtccagcggcagaaggagttaatgcgccagaggcagcagcagcaagaggctctccggaggttgcagcagcagcagcagcaacaacagctggcgcagatgaagcttccttcttcttcaacgtggggccagcagtccaatacaacagcatgtcagtcccaggccacgctgtcgttggctgaaatccaaaaactagaggaagaacgagaacggcagcttcgagaagagcaaaggcgccagcagagggagttgatgaaagctcttcagcagcagcagcaacagcaacagcagaaactctcaggttgggggaatgtcagcaaaccttcaggtaccacgaaatctcttctggagatccagcaggaagaggccaggcaaatgcaaaagcagcagcagcagcagcagcaacaccagcaaccaaacagagctcgtaacaatacgcattccaacctgcacaccagcattgggaattctgtttggggctctataaatactggtcctcctaaccagtgggcatctgacctagtcagtagtatttggagtaatgctgacactaaaaactccaacatgggattctgggatgatgcagtgaaagaggtgggacctaggaattcaacaaataaaaataaaaacaacgccagtctcagtaaatctgtaggtgtgtctaaccggcagaataagaaagtagaagaagaagaaaagttgctgaagctctttcagggagtaaataaagcccaagatggatttacgcagtggtgtgaacagatgcttcatgcccttaatacggcaaataacttggatgttcccacatttgtttctttcctgaaagaagtagaatctccttatgaggtccatgattatatcagggcctatttaggagatacttctgaggccaaggagtttgccaagcagttccttgagcgccgtgccaaacagaaagccaaccagcagcgtcagcagcagcagctgccacagcagcagcagcagcagccgccacagcagccgccacagcagccacaacagcaggactctgtgtgggggatgaaccacagtacactccattcagtatttcagaccaatcaaagcaacaaccaacaatccaattttgaggctgtgcagagtggcaagaagaagaaaaagcagaagatggtccgagcagatcccagtttattaggattttcagtcaatgcatcatcggagcgactcaacatgggtgaaatcgagacgttggatgactactgagcacctgccagtggactggccatccctctcctgtctgccgactatggagtctccacctttggacacaacacttactcaccatttactctttatcactctgcaacaaatcacagaaccgatcatctcaggctttttcttctggccctttgtgtccaagattctttaatccatttttgttggtgaacatctcagactatagataagtggactggaccctgtgtcttgggggtggcagttgggattactccccaacaaggctgattttaggcagcatgtgttcactgtgctgtgatttcatctactgtctcccagaaagtgtgttgggatcggccattagcagcttgctttctcttgtcactttttttcttctattttgttttttcttcttctttttccccccatcagggcaaatggtctaactggtgcaatcatgaagagagttaatggttaacagacattggccaataacaaaacaccccatggactgtgactcgagtatccaacaggcagtcagagctctcccggtctgaaagttgcattgccactgctaactttgggattgcatcagagaggccctgagtggggttgagatgaggttggtttggtttgatgttacacactcctcacctgttctttctgagtgtcctttctctgaaaggatttatgtttttcttcgttagatagtgacttctgagcaagctgatctcccctggcatgctccaacctgattggacaaaggaagctctatggcctgggagagagactattcttaatttttctttcttacaaaaactgatttttcccataaatatttttacttcagaggactaggaccattttgttttgggcccttctgctgaaaatttgtctcgtttaagaggcagctagaatctttaccatatgtatgaatttgtataatttcatttttggatagggataaacttttgcttctgataaaagcctggaatttcatctggtcctcagagcattgcgtgtgtgtcttgctgtagcccggaaaaggttttgtgtaaagattctgggatggcaagttgtttgccttttctgaaaagagaacatacagaacctgtccatctttaagaccttcatccatggaatctactatacaggaggatgcagtgggctggaggggatgggcgaaaatgggagcaggaagcctggcctggcttctggtcatggcctcctaaaaccttaaacttcaagtagaaatgtactcaagccctatttataaacaaatacttttcctgcctccaccaaacccctacagaacatcacctggaattgccactcacactgggttggagtcattgggcagctgtgcctgtgcgagaggtgctgtggtctgggcagcccctggaaaagcacctttgctgcctgtcattgttgcctgaagaaggctggagttgctctgagagcagtttgggtttggagtattatatttggcttctatttttattattttggatcaccattctccctatcccttcttgcctccctcccttctaaacatgtgtaataactatacagagactgctacaaaattgtatatagtttttggatcaaatagcatgaggggagaggaaaccattaaaagttggggctcctactctcctttgctttgtaaattcaaaagttgggggtgggtaagagggatagttaaaatgtttacaaaactttaggctccctcggaacttttgccagtgtggaggaaaataaaaaagaacttaaataaaatctgattgtattct

SEQ ID NO: 76 - protein, 632 aa, Homosapiens
MRISDQNIIPSVTRSVSVPDTGSIWELQPTASQPTVWEGGSVWDLPLDTTTPGPALEQLQQLEKAKAAKLEQERREAEMRAKREEEERKRQEELRRQQEEILRRQQEEERKRREEEELARRKQEEALRRQREQEIALRRQREEEERQQQEEALRRLEERRREEEERRKQEELLRKQEEEAAKWAREEEEAQRRLEENRLRMEEEAARLRHEEEERKRKELEVQRQKELMRQRQQQQEALRRLQQQQQQQQLAQMKLPSSSTWGQQSNTTACQSQATLSLAEIQKLEEERERQLREEQRRQQRELMKALQQQQQQQQQKLSGWGNVSKPSGTTKSLLEIQQEEARQMQKQQQQQQQHQQPNRARNNTHSNLHTSIGNSVWGSINTGPPNQWASDLVSSIWSNADTKNSNMGFWDDAVKEVGPRNSTNKNKNNASLSKSVGVSNRQNKKVEEEEKLLKLFQGVNKAQDGFTQWCEQMLHALNTANNLDVPTFVSFLKEVESPYEVHDYIRAYLGDTSEAKEFAKQFLERRAKQKANQQRQQQQLPQQQQQQPPQQPPQQPQQQDSVWGMNHSTLHSVFQTNQSNNQQSNFEAVQSGKKKKKQKMVRADPSLLGFSVNASSERLNMGEIETLDDY

SEQ ID NO: 77 - DNA, 658 bp, Homosapiens
gagccaggcccagcctggaaatggatgtcataagtgcacaggggtctagggaggcagagagcgaaagaggaaacaggagcgttttaggaaagactagagctgcctgagggtttggatcaaaactgctttaaaagtccttcttcaacaagcactgagcacctactccgggccaggcatggagaacccagagttaaccagcgcagtcctccgtgcgtcccgcccgccgctgccctcactcccggccaggatggcatcctgtctggccctgcgcatggcgctgctgctggtctccggggttctggcccctgcggtgctcacagacgatgttccacaggagcccgtgcccacgctgtggaacgagccggccgagctgccgtcgggagaaggccccgtggagagcaccagccccggccgggagcccgtggacaccggtcccccagcccccaccgtcgcgccaggacccgaggacagcaccgcgcaggagcggctggaccagggcggcgggtcgctggggcccggcgctatcgcggccatcgtgatcgccgccctgctggccacctgcgtggtgctggcgctcgtggtcgtcgcgctgagaaagttttctgcctcctgaagcgaataaaggggccgcgcccggccgcggcgcgactcggctgca

SEQ ID NO: 78 - protein, 145 aa, Homosapiens
MENPELTSAVLRASRPPLPSLPARMASCLALRMALLLVSGVLAPAVLTDDVPQEPVPTLWNEPAELPSGEGPVESTSPGREPVDTGPPAPTVAPGPEDSTAQERLDQGGGSLGPGAIAAIVIAALLATCVVLALVVVALRKFSAS

SEQ ID NO: 79 - DNA, 468 bp, Homosapiens
gccaagagccgacctaccatccccatgttgagctttccagcgtttctggggcatcctgtctggttgccggggatggatggcccagggttggagtggtggtcaggggaggacaactggggtgggctggctgacgatgttccacaggagcccgtgcccacgctgtggaacgagccggccgagctgccgtcgggagaaggccccgtggagagcaccagccccggccgggagcccgtggacaccggtcccccagcccccaccgtcgcgccaggacccgaggacagcaccgcgcaggagcggctggaccagggcggcgggtcgctggggcccggcgctatcgcggccatcgtgatcgccgccctgctggccacctgcgtggtgctggcgctcgtggtcgtcgcgctgagaaagttttctgcctcctgaagcgaataaaggggccgcgcccggccgcggcgcgactcggctgca

SEQ ID NO: 80 - protein, 132 aa, Homosapiens
MLSFPAFLGHPVWLPGMDGPGLEWWSGEDNWGGLADDVPQEPVPTLWNEPAELPSGEGPVESTSPGREPVDTGPPAPTVAPGPEDSTAQERLDQGGGSLGPGAIAAIVIAALLATCVVLALVVVALRKFSAS

SEQ ID NO: 81 - DNA, 503 bp, Homosapiens
ggcttcagcttcttagcctgggaaatgtgagggctagtgcagcgctgagcccagacccctcacacagcgctaccggcaacttgcttaacctagaggtggggggtgacgtccctgtcggccccgtcacctggggccccagcacctctccttggctttgcagacgatgttccacaggagcccgtgcccacgctgtggaacgagccggccgagctgccgtcgggagaaggccccgtggagagcaccagccccggccgggagcccgtggacaccggtcccccagcccccaccgtcgcgccaggacccgaggacagcaccgcgcaggagcggctggaccagggcggcgggtcgctggggcccggcgctatcgcggccatcgtgatcgccgccctgctggccacctgcgtggtgctggcgctcgtggtcgtcgcgctgagaaagttttctgcctcctgaagcgaataaaggggccgcgcccggccgcggcgcgactcggctgcactcct

SEQ ID NO: 82 - protein, 71 aa, Homosapiens
MFHRSPCPRCGTSRPSCRREKAPWRAPAPAGSPWTPVPQPPPSRQDPRTAPRRSGWTRAAGRWGPALSRPS

SEQ ID NO: 83 - DNA, 1899 bp, Homosapiens
ggcttcagcttcttagcctgggaaatgtgagggctagtgcagcgctgagcccagacccctcacacagcgctaccggcaacttgcttaacctagaggtggggggtgacgtccctgtcggccccgtcacctggggccccagcacctctccttggctttgcagacgatgttccacaggagcccgtgcccacgctgtggaacgagccggccgagctgccgtcgggagaaggccccgtggagagcaccagccccggccgggagcccgtggacaccggtcccccagcccccaccgtcgcgccaggacccgaggacagcaccgcgcaggagcggctggaccagggcggcgggtcgctggggcccggcgctatcgcggccatcgtgatcgccgccctgctggccacctgcgtggtgctggcgctcgtggtcgtcgcgctgagaaagttttctgcctcctgaagcgaataaaggggccgcgcccggccgcggcgcgactcggctgcactcctcacgcgcctgtatgtccgcgcgtgcgtgtccgcgcatgcaggtgtgccagagcgtgagcgcgcgcaggcgagcgctcagggcgggggtgcgcgcggggccgagggtgggtgccgtgcacgcgcgcgggtccggaggcgcgcccgaattccccgcaggggcgccggggcgtgcgtgagcgcacagcatgtccgagcccgcctgcgtgtggcgtgcacctgagcgcgcgcagggccgcgcggctcggcgtccccgtgcaccacggctggagtgcctcaggagcgcgccgcatgtgcgtgcccggtgcgcgtgcgccggggccgccagggcatcggagcgggtgtgcggccagcggtcttagcccgtccgggggcaccgtcacggtcagggccacgccacgggcggccccttctcccggcgccgcctcctctgcctgggcgcgggccgaggccctcgccgcgctccccggggcctgcctcccatcccgctccgctggggttcagagcgttccgtgaggaggtaagcgctagggcaggagaggccgacagagaccccggggcccgccgctccttgaggccggggttggggagggcaggggccgtcggctctcccagccagaggccgcgtggttttgggggacgtcttgactctgagtcctgcagccagggccccatccgcgggctcagaccagcagccccaagcccccctctgcccagggagcctcaggagcaggatgagtcgagagtcgacgccggacacggcccgcccctgcttcctactctcacccccaggcctggctgggggccggcagcccccacgcccacggttggtttgttcagggagagaaaacggctttcccagctctactcacctcacttcaccctcagagagtcggggcggagtgagggtgaggagcctggtccagggtccccacctcggaagcatttagagatgtaaactttgatcctttgatcatttaacctgctcagcacagcaggaagtgggaacttggtccctaccccagtccccagggcctttggagggaagggttggacagtttggaggccagcagaccccttggggacagcttaatgtatctgaagattcctgagtgggaatgttgctggagggcaagctgcttctcttttttaaaaattcattttctctagcagctgttttggcccctttggtgtccctgagctccccatggcactgtttcctgccgtgactttctcctcctggacactggagcccaggtggtgcccgcgcacctctcacacactgggggatagggtcaaggcctcatccaagtctgttaacagcttcccactcaaccagtctccccaaaatacactgtgagttcaatgattctgcttataaaggagtgctatgaaactg

SEQ ID NO: 84 - protein, 71 aa, Homosapiens; identical to SEQ ID NO: 82

SEQ ID NO: 85 - DNA, 2805 bp, Homosapiens
ggcttcagcttcttagcctgggaaatgtgagggctagtgcagcgctgagcccagacccctcacacagcgctaccggcaacttgcttaacctagaggtggggggtgacgtccctgtcggccccgtcacctggggccccagcacctctccttggctttgcagacgatgttccacaggagcccgtgcccacgctgtggaacgagccggccgagctgccgtcgggagaaggccccgtggagagcaccagccccggccgggagcccgtggacaccggtcccccagcccccaccgtcgcgccaggacccgaggacagcaccgcgcaggagcggctggaccagggcggcgggtcgctggggcccggcgctatcgcggccatcgtgatcgccgccctgctggccacctgcgtggtgctggcgctcgtggtcgtcgcgctgagaaagttttctgcctcctgaagcgaataaaggggccgcgcccggccgcggcgcgactcggctgcactcctcacgcgcctgtatgtccgcgcgtgcgtgtccgcgcatgcaggtgtgccagagcgtgagcgcgcgcaggcgagcgctcagggcgggggtgcgcgcggggccgagggtgggtgccgtgcacgcgcgcgggtccggaggcgcgcccgaattccccgcaggggcgccggggcgtgcgtgagcgcacagcatgtccgagcccgcctgcgtgtggcgtgcacctgagcgcgcgcagggccgcgcggctcggcgtccccgtgcaccacggctggagtgcctcaggagcgcgccgcatgtgcgtgcccggtgcgcgtgcgccggggccgccagggcatcggagcgggtgtgcggccagcggtcttagcccgtccgggggcaccgtcacggtcagggccacgccacgggcggccccttctcccggcgccgcctcctctgcctgggcgcgggccgaggccctcgccgcgctccccggggcctgcctcccatcccgctccgctggggttcagagcgttccgtgaggaggtaagcgctagggcaggagaggccgacagagaccccggggcccgccgctccttgaggccggggttggggagggcaggggccgtcggctctcccagccagaggccgcgtggttttgggggacgtcttgactctgagtcctgcagccagggccccatccgcgggctcagaccagcagccccaagcccccctctgcccagggagcctcaggagcaggatgagtcgagagtcgacgccggacacggcccgcccctgcttcctactctcacccccaggcctggctgggggccggcagcccccacgcccacggttggtttgttcagggagagaaaacggctttcccagctctactcacctcacttcaccctcagagagtcggggcggagtgagggtgaggagcctggtccagggtccccacctcggaagcatttagagatgtaaactttgatcctttgatcatttaacctgctcagcacagcaggaagtgggaacttggtccctaccccagtccccagggcctttggagggaagggttggacagtttggaggccagcagaccccttggggacagcttaatgtatctgaagattcctgagtgggaatgttgctggagggcaagctgcttctcttttttaaaaattcattttctctagcagctgttttggcccctttggtgtccctgagctccccatggcactgtttcctgccgtgactttctcctcctggacactggagcccaggtggtgcccgcgcacctctcacacactgggggatagggtcaaggcctcatccaagtctgttaacagcttcccactcaaccagtctccccaaaatacactgtgagttcaatgattctgcttataaaggagtgctatgaaactgacctattttcctaattggttaactgacttcatctcacataaccttgagtaaccaaagccttcatcagagcggacgatccaacccaacatgctgtttcccatcctcaaaaggcacggggaccaatggccacccaactccttcccaaccctcccctccagggacgagagatggccccctctttccctttccccactctgcaagcactcccccaccaacgggtgcatcacagcccctcactgggaccagggggcctccctctccggtggaaccagtgtcacatgcctgtgcatctctgtgattctcagagggtctgaggtccgagcaccctgctgtggcctgtgggaagacgctacaaagtcccactggatctaaaccagaggcctgttctggcgagcagggaaactgtgtcctggcagagatcgtggtcctgggcacacaggacccctcagcacactgaggtggagctggggcgaggggagggggtgcgctctgggtaactgaaggtgtgaagggcccagggcctgtttctgggcagtgcaggaagtcccagccccatgcctgtggtgagatcccctgtagggccccccccaccatggacacttcggggcctctacggtcttccaaagctgtgtcctcatttccactgcagcagaggggcgtccccagctccgtcaaacagccctttctgtttctggagtcctacaagtggaggcccaaatccgttcccatgttgaggcaaggccctggctgttccttcctctctggaaaccgccttgaactcttcctttgggacatgcctcctcgaccagccttgaaggggtgctcctctctcactacctggaaccaaacacccccttcctttgtgtacaagggcaataaagagtagaccttcatcttctttatttt

SEQ ID NO: 86 - protein, 71 aa, Homosapiens; identical to SEQ ID NO: 82

SEQ ID NO: 87 - DNA, 660 bp, Homosapiens
tgcacgcgcgcgggtccggaggcgcgcccgaattccccgcaggggcgccggggcgtgcgtgagcgcacagcatgtccgagcccgcctgcgtgtggcgtgcacctgagcgcgcgcagggccgcgcggctcggcgtccccgtgcaccacggctggagtgcctcaggagcgcgccgcatgtgcgtgcccggtgcgcgtgcgccggggccgccagggcatcggagcgggtgtgcggccagcggtcttagcccgtccgggggcaccgtcacggtcagggccacgccacgggcggccccttctcccggcgccgcctcctctgcctgggcgcgggccgaggccctcgccgcgctccccggggcctgcctcccatcccgctccgctggggttcagagcgttccgtgaggagcagaggggcgtccccagctccgtcaaacagccctttctgtttctggagtcctacaagtggaggcccaaatccgttcccatgttgaggcaaggccctggctgttccttcctctctggaaaccgccttgaactcttcctttgggacatgcctcctcgaccagccttgaaggggtgctcctctctcactacctggaaccaaacacccccttcctttgtgtacaagggcaataaagagtagaccttcatcttctttatttt

SEQ ID NO: 88 - protein, 74 aa, Homosapiens [sequence omitted]

SEQ ID NO: 89 - DNA, 1474 bp, Homosapiens
gacagagggagactctgtctcaaaaagaaaacacaagttcagctgccttatggagaagctgctaaccctgaccatgtgaaccctgtcctgaccaccccaaaccacacccagggccatatcccaggtacaaaaagttccttctgaagtttaaactaaggccccctcacagcctttatgcatgtatttcttcccagaactcctggctatgttaataacgttttctatggaaacaaatcctcctcttcctcagacgagcccttctccagttgctgtgggagttttcctattctaggcagggctcagctgcgggcttggtgggagtgtgcaggtgggtagtgcggtggtggggatgtgcccgtgcctcttgtccctcagactgcccccaggtccagtgcgtgcacccatacgtggctcagcagccagacgagctgacgctggagctcgccgacatcctcaacatcctggacaagactgacgacgggtggatctttggcgagcgtctgcacgaccaggagagaggctggttccccagctccatgactgaggagatcttgaatcccaagatccggtcccagaacctcaaggaatgtttccgtgtccacaagatggatgaccctcagcgcagccagaacaaggaccgcaggaagctgggcagccggaatcggcaatgacccccacccagggggccagcgggagcagggcctgcatgagaccccgacagaaggtgggggggggggggctctgggaagcacaggccagcacctccccaggtggcaggatctggcttggggtgcccggccctcatccctgcccacgcagtgagtgctcatgtgtcttggccccttgctcgcaaactggataaagggtgcccaagcctctcctgatgcatttgtaaacaagaaggtttcagcagtattacaccacctccctcatgcctccgagggggtggaagggggtgggcacactccagggccccccatgcccctggcccccagggactggaagaggctcccaacccagagtgtccctgtgggaggcaggcagaaggtgacaattgacacgatttcctgcacgcgtcctcctctaccttggaagcagttagaatctaccaggcacagatgaggccgcccttgcctgacggagcttgatgagcagcccttggtctccggttccaggactgagagcccagctgcctctgcccacccttccccaggcctctgccagcctctggctgcacggtcaggccctgccccatggcaggcctgccagagcttggctggggacccctcccgcctctggctccctgatgggctggatgtaacttgtgtcttctagccccttaaggagcccaggtgttttaaggaatgaattggtcactgcatcttgtatcgattatggttctgagaaaagcaaatatcacttttggctgcattaaaagaagcatcatatataaaataaagaagatgaaggtcta

SEQ ID NO: 90 - protein, 97 aa, Homosapiens [sequence omitted]

SEQ ID NO: 91 - DNA, 1696 bp, Homosapiens
aaccgcttgtgcaaaggccccaagactgcaagaacatcctgaagagggtagaagagaggtctgagcgggagtgcactgctttggatgctcacaaggagctggaaatggtggtgaaggcatgcaacgagggcgtcaggaaaatgagccgcacggaacagatgatcagcattcagaagaagatggagttcaagatcaagtcggtgcccatcatctcccactcccgctggctgctgaagcagggtgagctgcagcagatgtcaggccccaagacctcccggaccctgaggaccaagaagctcttccacgaaatttacctcttcctgttcaacgacctgctggtgatctgccggcagattccaggagacaagtaccaggtatttgactcagctccgcggggactgctgcgtgtggaggagctggaggaccagggccagacgctggccaacgtgttcatcctgcggctgctggagaacgcagatgaccgggaggccacctacatgctaaaggcgtcctctcagagtgagatgaagcgttggatgacctcactggcccccaacaggaggaccaagtttgtttcgttcacatcccggctgctggactgcccccaggtccagtgcgtgcacccatacgtggctcagcagccagacgagctgacgctggagctcgccgacatcctcaacatcctggacaagactgacgacgggtggatctttggcgagcgtctgcacgaccaggagagaggctggttccccagctccatgactgaggagatcttgaatcccaagatccggtcccagaacctcaaggaatgtttccgtgtccacaagatggatgaccctcagcgcagccagaacaaggaccgcaggaagctgggcagccggaatcggcaatgacccccacccagggggccagcgggagcagggcctgcatgagaccccgacagaaggtgggggggggggggctctgggaagcacaggccagcacctccccaggtggcaggatctggcttggggtgcccggccctcatccctgcccacgcagtgagtgctcatgtgtcttggccccttgctcgcaaactggataaagggtgcccaagcctctcctgatgcatttgtaaacaagaaggtttcagcagtattacaccacctccctcatgcctccgagggggtggaagggggtgggcacactccagggccccccatgcccctggcccccagggactggaagaggctcccaacccagagtgtccctgtgggaggcaggcagaaggtgacaattgacacgatttcctgcacgcgtcctcctctaccttggaagcagttagaatctaccaggcacagatgaggccgcccttgcctgacggagcttgatgagcagcccttggtctccggttccaggactgagagcccagctgcctctgcccacccttccccaggcctctgccagcctctggctgcacggtcaggccctgccccatggcaggcctgccagagcttggctggggacccctcccgcctctggctccctgatgggctggatgtaacttgtgtcttctagccccttaaggagcccaggtgttttaaggaatgaattggtcactgcatcttgtatcgattatggttctgagaaaagcaaatatcacttttggctgcattaaaagaagcatcatatataaaataaagaagatgaaggtcta

SEQ ID NO: 92 - protein, 262 aa, Homosapiens [sequence omitted]

SEQ ID NO: 93 - DNA, 3176 bp, Homosapiens
caggacaggacgaagtttttggctgtgggctctctgggacagagtggagcgcctgtggatttagccggggacacaccatcctgctcgcaggtgcctggacaggacaggggacgagggaggaacactctctgaggaagcccaactcctatgagctcctctctggcagcactcaaaccagtgaagcttgggaaagtcattgacctccagtcgttctgctgagaaacatctggctctatttccatggagaccagggaatctgaagatttggaaaagacccggaggaaatcagcaagtgatcaatggaacactgataatgaaccagccaaggtgaaacctgagttactcccagaaaaagaggagacttctcaagctgaccaggatatccaagacaaagagcctcattgccacatcccaattaagagaaattccatcttcaatcgctccataagacgcaaaagcaaagccaaggccagagacaaccccgaacggaacgccagctgcctggcagattcacaggacaatggaaaatctgtaaatgagcccctgaccttgaatatcccctggagcagaatgcctccttgcagaacagcaatgcagacagacccaggagcccaggaaatgagtgagtcgtcctccaccccgggaaatggggccacgcccgaggagtggccggccctggccgacagccccaccacgctcaccgaggccctgcggatgatccaccccattcccgccgactcctggagaaacctcattgaacaaatagggctcctgtatcaggaataccgagataaatcgactctccaagaaatcgaaaccaggaggcaacaggatgcagaaatagaagacaataccaatgggtccccggccagtgaggacaccccggaggaggaagaagaagaggaggaggaggaggagccggccagcccaccagagaggaagactctgccccagatctgcctgctcagtaacccccactcaaggttcaacctctggcaggatcttcccgagatccggagcagcggggtgcttgagatcctacagcccgaggagattaagctgcaggaggccatgttcgagctggtcacttccgaggcgtcctactacaagagtctgaacctgctcgtgtcccacttcatggagaacgagcggataaggaagatcctgcacccgtccgaggcgcacatcctcttctccaacgtcctggacgtgctggctgtcagtgagcggttcctcctggagctggagcaccggatggaggagaacatcgtcatctctgacgtgtgtgacattgtgtaccgttatgcggccgaccacttctctgtctacatcacctacgtcagcaatcagacctaccaggagcggacctataagcagctgctccaggagaaggcagctttccgggagctgatcgcgcagctagagctcgaccccaagtgcagggggctgcccttctcctccttcctcatcctgcctttccagaggatcacacgcctcaagctgttggtccagaacatcctgaagagggtagaagagaggtctgagcgggagtgcactgctttggatgctcacaaggagctggaaatggtggtgaaggcatgcaacgagggcgtcaggaaaatgagccgcacggaacagatgatcagcattcagaagaagatggagttcaagatcaagtcggtgcccatcatctcccactcccgctggctgctgaagcagggtgagctgcagcagatgtcaggccccaagacctcccggaccctgaggaccaagaagctcttccacgaaatttacctcttcctgttcaacgacctgctggtgatctgccggcagattccaggagacaagtaccaggtatttgactcagctccgcggggactgctgcgtgtggaggagctggaggaccagggccagacgctggccaacgtgttcatcctgcggctgctggagaacgcagatgaccgggaggccacctacatgctaaaggcgtcctctcagagtgagatgaagcgttggatgacctcactggcccccaacaggaggaccaagtttgtttcgttcacatcccggctgctggactgcccccaggtccagtgcgtgcacccatacgtggctcagcagccagacgagctgacgctggagctcgccgacatcctcaacatcctggacaagactgacgacgggtggatctttggcgagcgtctgcacgaccaggagagaggctggttccccagctccatgactgaggagatcttgaatcccaagatccggtcccagaacctcaaggaatgtttccgtgtccacaagatggatgaccctcagcgcagccagaacaaggaccgcaggaagctgggcagccggaatcggcaatgacccccacccagggggccagcgggagcagggcctgcatgagaccccgacagaaggtgggggggggggggctctgggaagcacaggccagcacctccccaggtggcaggatctggcttggggtgcccggccctcatccctgcccacgcagtgagtgctcatgtgtcttggccccttgctcgcaaactggataaagggtgcccaagcctctcctgatgcatttgtaaacaagaaggtttcagcagtattacaccacctccctcatgcctccgagggggtggaagggggtgggcacactccagggccccccatgcccctggcccccagggactggaagaggctcccaacccagagtgtccctgtgggaggcaggcagaaggtgacaattgacacgatttcctgcacgcgtcctcctctaccttggaagcagttagaatctaccaggcacagatgaggccgcccttgcctgacggagcttgatgagcagcccttggtctccggttccaggactgagagcccagctgcctctgcccacccttccccaggcctctgccagcctctggctgcacggtcaggccctgccccatggcaggcctgccagagcttggctggggacccctcccgcctctggctccctgatgggctggatgtaacttgtgtcttctagccccttaaggagcccaggtgttttaaggaatgaattggtcactgcatcttgtatcgattatggttctgagaaaagcaaatatcacttttggctgcattaaaagaagcatcatatataaaataaagaagatgaaggtcta

SEQ ID NO: 94 - protein, 710 aa, Homosapiens
METRESEDLEKTRRKSASDQWNTDNEPAKVKPELLPEKEETSQADQDIQDKEPHCHIPIKRNSIFNRSIRRKSKAKARDNPERNASCLADSQDNGKSVNEPLTLNIPWSRMPPCRTAMQTDPGAQEMSESSSTPGNGATPEEWPALADSPTTLTEALRMIHPIPADSWRNLIEQIGLLYQEYRDKSTLQEIETRRQQDAEIEDNTNGSPASEDTPEEEEEEEEEEEPASPPERKTLPQICLLSNPHSRFNLWQDLPEIRSSGVLEILQPEEIKLQEAMFELVTSEASYYKSLNLLVSHFMENERIRKILHPSEAHILFSNVLDVLAVSERFLLELEHRMEENIVISDVCDIVYRYAADHFSVYITYVSNQTYQERTYKQLLQEKAAFRELIAQLELDPKCRGLPFSSFLILPFQRITRLKLLVQNILKRVEERSERECTALDAHKELEMVVKACNEGVRKMSRTEQMISIQKKMEFKIKSVPIISHSRWLLKQGELQQMSGPKTSRTLRTKKLFHEIYLFLFNDLLVICRQIPGDKYQVFDSAPRGLLRVEELEDQGQTLANVFILRLLENADDREATYMLKASSQSEMKRWMTSLAPNRRTKFVSFTSRLLDCPQVQCVHPYVAQQPDELTLELADILNILDKTDDGWIFGERLHDQERGWFPSSMTEEILNPKIRSQNLKECFRVHKMDDPQRSQNKDRRKLGSRNRQ

SEQ ID NO: 95 - DNA, 451 bp, Homosapiens
ctgagttactcccagaaaaagaggagacttctcaagctgaccaggatatccaagacaaagagcctcattgccacatcccaattaagagaaattccatcttcaatcgctccataagacgcaaaagcaaagccaaggccagagacaaccccgaacggaacgccagctgcctggcagattcacaggacaatggaaaatctgtaaatgagcccctgaccttgaatatcccctggagcagaatgcctccttgcagaacagcaatgcagacagacccaggagcccaggaaatgaggtaagagatggcagatcatgaggaatgctggtctgggaaagatgcatcagaggtcattgctgcaaagacttgacagggttacgagggtgtcatgttaaaaaaaataataataacttttggttgcccgtgctaaaaaaataaataaataaaaactccataatt

SEQ ID NO: 96 - protein, 38 aa, Homosapiens
MLVWERCIRGHCCKDLTGLRGCHVKKNNNNFWLPVLKK

SEQ ID NO: 97 - DNA, 641 bp, Homosapiens
actggcgtcgtgggtgtggggcctgggcagtcacagggccctgttcttagaaggtgccccggcttgctttaatgctgtgttgttgtccttttgaaagccttactattttaacaaggggccctgcatttttatattgcacagggccctgcaattatgcagccattcctgcttttgatctcacttaccccacagccataatggaagagcgcctggaaggagtccttatcctgattcccagatggtgaaactgagtgccaggaggggcagtgctgaagccgagaccagacaggatccctcgggtggaatccagggctgctgtttctcttgggggctcctcctcagtgaatggatgggtggcacctgcgagcaggatggtgtgtccccggctaaatccacaggcgctccactctgtcccagagagcccacagccaaaaacttcgtcctgtcctggaaaagcttcactgccttccaacagagccttcctgcatgccgaggttgaagaggtgtccgctgagtgctctgtcttctgggaattttggctgtttcctgcaacctatcatcagatgccacacttatgagaccctcatccttctgctcactctcttccattgtttcactcattaaaaatatatattttaagc

SEQ ID NO: 98 - protein, 86 aa, Homosapiens
MVKLSARRGSAEAETRQDPSGGIQGCCFSWGLLLSEWMGGTCEQDGVSPAKSTGAPLCPREPTAKNFVLSWKSFTAFQQSLPACRG

SEQ ID NO: 99 - DNA, 665 bp, Homosapiens
gcaattatgcagccattcctgcttttgatctcacttaccccacagccataatggaagagcgcctggaaggagtccttatcctgattcccagatggtgaaactgagtgccaggaggggcagtgctgaagccgagaccagacaggatccctcgggtggaatccagggctgctgtttctcttgggggctcctcctcagtgaatggatgggtggtaatctcctttcctacctgtcctagcggtagcctctgttccttctcttgttttatctcattttatttttttaaaaaataccaaaaccattctctcacctgccagagaggagctcataggagttgggcttcctcagagagtgttcctccctcgtcccctgtcctgtccaggcacctgcgagcaggatggtgtgtccccggctaaatccacaggcgctccactctgtcccagagagcccacagccaaaaacttcgtcctgtcctggaaaagcttcactgccttccaacagagccttcctgcatgccgaggttgaagaggtgtccgctgagtgctctgtcttctgggaattttggctgtttcctgcaacctatcatcagatgccacacttatgagaccctcatccttctgctcactctcttccattgtttcactcattaaaaatatatattttaagca

SEQ ID NO: 100 - protein, 68 aa, Homosapiens
MVCPRLNPQALHSVPESPQPKTSSCPGKASLPSNRAFLHAEVEEVSAECSVFWEFWLFPATYHQMPHL

SEQ ID NO: 101 - DNA, 1143 bp, Homosapiens
atggcgtcccttcctgtcctgcagaaggagagcgtgttccagtcgggagcccatgcctacagaatccctgccctgctctacctgcctgggcagcagtccctgctggccttcgcggaacagcgggcaagcaagaaggatgagcacgcagagctgattgtcctgcgcagaggagactacgacgcacccacccaccaggttcagtggcaagctcaggaggtggtggcccaggcccggctggatggccaccggtccatgaacccatgccccttgtatgacgcgcagacggggaccctcttcctcttcttcattgccatccctgggcaagtcacggagcaacagcagctgcagaccagggccaatgtgacgcggctgtgccaagtcaccagcactgaccacgggaggacctggagctcccccagagacctcactgatgcggccatcggcccagcctaccgggagtggtccacctttgcagtgggcccggggcattgtttgcagcttcacgacagggcccggagcctggtggtgcccgcctacgcctaccggaaacttcaccccatccaaaggccgatcccctctgccttctgcttcctcagccatgaccatgggcgcacgtgggcgcgagggcactttgtggcccaggacaccctggagtgccaggtggccgaagtcgagactggggagcagagggtggtgaccctcaacgcgagaagccacctccgagccagggtccaggcccagagcaccaatgacgggcttgatttccaggagtctcagctggtgaagaagctggtggagccgccgccccagggctgccaggggagcgtcatcagcttccccagcccccgctcggggcctggctccccagcccagtggctgctctacactcaccccacacactcctggcagagggccgacctgggtgcctacctcaacccgcgacctccagcccctgaggcctggtcagagccggtactgctggccaagggcagctgtgcctactcagacctccagagcatgggcaccggccctgatgggtcccccttgtttgggtgtctgtacgaagccaatgattacgaggagattgtctttctcatgttcaccctgaagcaagccttcccagctgagtacctgcctcagtga

SEQ ID NO: 102 - protein, 380 aa, Homosapiens
MASLPVLQKESVFQSGAHAYRIPALLYLPGQQSLLAFAEQRASKKDEHAELIVLRRGDYDAPTHQVQWQAQEVVAQARLDGHRSMNPCPLYDAQTGTLFLFFIAIPGQVTEQQQLQTRANVTRLCQVTSTDHGRTWSSPRDLTDAAIGPAYREWSTFAVGPGHCLQLHDRARSLVVPAYAYRKLHPIQRPIPSAFCFLSHDHGRTWARGHFVAQDTLECQVAEVETGEQRVVTLNARSHLRARVQAQSTNDGLDFQESQLVKKLVEPPPQGCQGSVISFPSPRSGPGSPAQWLLYTHPTHSWQRADLGAYLNPRPPAPEAWSEPVLLAKGSCAYSDLQSMGTGPDGSPLFGCLYEANDYEEIVFLMFTLKQAFPAEYLPQ

SEQ ID NO: 103 - DNA, 4911 bp, Homosapiens
gggcaggccgtagtcccagttgagaagctgtgcccccttgggtgttttggaggttcagggtgggtgctgaaaagccctgagggagagcagaaggctcgggggcctgtctagggcatggcatcccacgtgggtgtcagcacggccgcagaagaaccacttctctggcccacccatgcctgctaggccatgcttcttcagaagtggccacaactctcctgacgtctccagagccggtcattccacccagggggacttcagctgccactggacacttcaattgtacgctgcgaccagttgccaggaaggagagggctggcaagagagccgcggcagccgtggcagggtgtaggggacggtggacggccagggcccccccctctctctctttctctctctctctcttgcttggtttctgtaatgaggaagttctccgcagctcagtttcctttccctcactgagcgcctgaaacaggaagtcagtcagttaagctggtggcagcagccgaggccaccaagaggcaacgggcggcaggttgcagtggaggggcctccgctcccctcggtggtgtgtgggtcctgggggtgcctgccggcccggccgaggaggcccacgcccaccatggtcccctgctggaaccatggcaacatcacccgctccaaggcggaggagctgctttccaggacaggcaaggacgggagcttcctcgtgcgtgccagcgagtccatctcccgggcatacgcgctctgcgtgctgtatcggaattgcgtttacacttacagaattctgcccaatgaagatgataaattcactgttcaggcatccgaaggcgtctccatgaggttcttcaccaagctggaccagctcatcgagttttacaagaaggaaaacatggggctggtgacccatctgcaataccctgtgccgctggaggaagaggacacaggcgacgaccctgaggaggacacagtagaaagtgtcgtgtctccacccgagctgcccccaagaaacatcccgctgactgccagctcctgtgaggccaaggaggttcctttttcaaacgagaatccccgagcgaccgagaccagccggccgagcctctccgagacattgttccagcgactgcaaagcatggacaccagtgggcttccagaagagcatcttaaggccatccaagattatttaagcactcagctcgcccaggactctgaatttgtgaagacagggtccagcagtcttcctcacctgaagaaactgaccacactgctctgcaaggagctctatggaagagagaaggcttctgccagctcctgcagcagatgaagaacaagcactcagagcagccggagcccgacatgatcaccatcttcatcggcacctggaacatgggtaacgccccccctcccaagaagatcacgtcctggtttctctccaaggggcagggaaagacgcgggacgactctgcggactacatcccccatgacatttacgtgatcggcacccaagaggaccccctgagtgagaaggagtggctggagatcctcaaacactccctgcaagaaatcaccagtgtgacttttaaaacagtcgccatccacacgctctggaacatccgcatcgtggtgctggccaagcctgagcacgagaaccggatcagccacatctgtactgacaacgtgaagacaggcattgcaaacacactggggaacaagggagccgtgggggtgtcgttcatgttcaatggaacctccttagggttcgtcaacagccacttgacttcaggaagtgaaaagaaactcaggcgaaaccaaaactatatgaacattctccggttcctggccctgggcgacaagaagctgagtccctttaacatcactcaccgcttcacgcacctcttctggtttggggatcttaactaccgtgtggatctgcctacctgggaggcagaaaccatcatccagaaaatcaagcagcagcagtacgcagacctcctgtcccacgaccagctgctcacagagaggagggagcagaaggtcttcctacacttcgaggaggaagaaatcacgtttgccccaacctaccgttttgagagactgactcgggacaaatacgcctacaccaagcagaaagcgacagggatgaagtacaacttgccttcctggtgtgaccgagtcctctggaagtcttatcccctggtgcacgtggtgtgtcagtcttatggcagtaccagcgacatcatgacgagtgaccacagccctgtctttgccacatttgaggcaggagtcacttcccagtttgtctccaagaacggtcccgggactgttgacagccaaggacagattgagtttctcaggtgctatgccacattgaagaccaagtcccagaccaaattctacctggagttccactcgagctgcttggagagttttgtcaagagtcaggaaggagaaaatgaagaaggaagtgagggggagctggtggtgaagtttggtgagactcttccaaagctgaagcccattatctctgaccctgagtacctgctagaccagcacatcctcatcagcatcaagtcctctgacagcgacgaatcctatggcgagggctgcattgcccttcggttagaggccacagaaacgcagctgcccatctacacgcctctcacccaccatggggagttgacaggccacttccagggggagatcaagctgcagacctctcagggcaagacgagggagaagctctatgactttgtgaagacggagcgtgatgaatccagtgggccaaagaccctgaagagcctcaccagccacgaccccatgaagcagtgggaagtcactagcagggcccctccgtgcagtggctccagcatcactgaaatcatcaaccccaactacatgggagtggggccctttgggccaccaatgcccctgcacgtgaagcagaccttgtcccctgaccagcagcccacagcctggagctacgaccagccgcccaaggactccccgctggggccctgcaggggagaaagtcctccgacacctcccggccagccgcccatatcacccaagaagtttttaccctcaacagcaaaccggggtctccctcccaggacacaggagtcaaggcccagtgacctggggaagaacgcaggggacacgctgcctcaggaggacctgccgctgacgaagcccgagatgtttgagaaccccctgtatgggtccctgagttccttccctaagcctgctcccaggaaggaccaggaatcccccaaaatgccgcggaaggaacccccgccctgcccggaacccggcatcttgtcgcccagcatcgtgctcaccaaagcccaggaggctgatcgcggcgaggggcccggcaagcaggtgcccgcgccccggctgcgctccttcacgtgctcatcctctgccgagggcagggcggccggcggggacaagagccaagggaagcccaagaccccggtcagctcccaggccccggtgccggccaagaggcccatcaagccttccagatcggaaatcaaccagcagaccccgcccaccccgacgccgcggccgccgctgccagtcaagagcccggcggtgctgcacctccagcactccaagggccgcgactaccgcgacaacaccgagctcccgcatcacggcaagcaccggccggaggaggggccaccagggcctctaggcaggactgccatgcagtgaagccctcagtgagctgccactgagtcgggagcccagaggaacggcgtgaagccactggaccctctcccgggacctcctgctggctcctcctgcccagcttcctatgcaaggctttgtgttttcaggaaagggcctagcttctgtgtggcccacagagttcactgcctgtgagacttagcaccaagtgctgaggctggaagaaaaacgcacaccagacgggcaacaaacagtctgggtccccagctcgctcttggtacttgggaccccagtgcctcgttgagggcgccattctgaagaaaggaactgcagcgccgatttgagggtggagatatagataataataatattaataataataatggccacatggatcgaacactcatgatgtgccaagtgctgtgctaagtgctttacgaacattcgtcatatcaggatgacctcgagagctgaggctctagccacctaaaaccacgtgcccaaacccaccagtttaaaacggtgtgtgttcggaggggtgaaagcattaagaagcccagtgccctcctggagtgagacaagggctcggccttaaggagctgaagagtctgggtagcttgtttagggtacaagaagcctgttctgtccagcttcagtgacacaagctgctttagctaaagtcccgcgggttccggcatggctaggctgagagcagggatctacctggcttctcagttctttggttggaaggagcaggaaatcagctcctattctccagtggagagatctggcctcagcttgggctagagatgccaaggcctgtgccaggttccctgtgccctcctcgaggtgggcagccatcaccagccacagttaagccaagccccccaacatgtattccatcgtgctggtagaagagtctttgctgttgctcccgaaagccgtgctctccagcctggctgccagggagggtgggcctcttggttccaggctcttgaaatagtgcagccttttcttcctatctctgtggctttcagctctgcttccttggttattaggagaatagatgggtgatgtctttccttatgttgctttttcaacatagcagaattaatgtagggagctaaatccagtggtgtgtgtgaatgcagaagggaatgcaccccacattcccatgatggaagtctgcgtaaccaataaattgtgcctttctcactc

SEQ ID NO: 104 - protein, 799 aa, Homosapiens [sequence omitted]

SEQ ID NO: 105 - DNA, 5230 bp, Homosapiens
gggcaggccgtagtcccagttgagaagctgtgcccccttgggtgttttggaggttcagggtgggtgctgaaaagccctgagggagagcagaaggctcgggggcctgtctagggcatggcatcccacgtgggtgtcagcacggccgcagaagaaccacttctctggcccacccatgcctgctaggccatgcttcttcagaagtggccacaactctcctgacgtctccagagccggtcattccacccagggggacttcagctgccactggacacttcaattgtacgctgcgaccagttgccaggaaggagagggctggcaagagagccgcggcagccgtggcagggtgtaggggacggtggacggccagggcccccccctctctctctttctctctctctctcttgcttggtttctgtaatgaggaagttctccgcagctcagtttcctttccctcactgagcgcctgaaacaggaagtcagtcagttaagctggtggcagcagccgaggccaccaagaggcaacgggcggcaggttgcagtggaggggcctccgctcccctcggtggtgtgtgggtcctgggggtgcctgccggcccggccgaggaggcccacgcccaccatggtcccctgctggaaccatggcaacatcacccgctccaaggcggaggagctgctttccaggacaggcaaggacgggagcttcctcgtgcgtgccagcgagtccatctcccgggcatacgcgctctgcgtgctgtatcggaattgcgtttacacttacagaattctgcccaatgaagatgataaattcactgttcaggcatccgaaggcgtctccatgaggttcttcaccaagctggaccagctcatcgagttttacaagaaggaaaacatggggctggtgacccatctgcaataccctgtgccgctggaggaagaggacacaggcgacgaccctgaggaggacacagtagaaagtgtcgtgtctccacccgagctgcccccaagaaacatcccgctgactgccagctcctgtgaggccaaggaggttcctttttcaaacgagaatccccgagcgaccgagaccagccggccgagcctctccgagacattgttccagcgactgcaaagcatggacaccagtgggcttccagaagagcatcttaaggccatccaagattatttaagcactcagctcgcccaggactctgaatttgtgaagacagggtccagcagtcttcctcacctgaagaaactgaccacactgctctgcaaggagctctatggaagagagaaggcttctgccagctcctgcagcagatgaagaacaagcactcagagcagccggagcccgacatgatcaccatcttcatcggcacctggaacatgggtaacgccccccctcccaagaagatcacgtcctggtttctctccaaggggcagggaaagacgcgggacgactctgcggactacatcccccatgacatttacgtgatcggcacccaagaggaccccctgagtgagaaggagtggctggagatcctcaaacactccctgcaagaaatcaccagtgtgacttttaaaacagtcgccatccacacgctctggaacatccgcatcgtggtgctggccaagcctgagcacgagaaccggatcagccacatctgtactgacaacgtgaagacaggcattgcaaacacactggggaacaagggagccgtgggggtgtcgttcatgttcaatggaacctccttagggttcgtcaacagccacttgacttcaggaagtgaaaagaaactcaggcgaaaccaaaactatatgaacattctccggttcctggccctgggcgacaagaagctgagtccctttaacatcactcaccgcttcacgcacctcttctggtttggggatcttaactaccgtgtggatctgcctacctgggaggcagaaaccatcatccagaaaatcaagcagcagcagtacgcagacctcctgtcccacgaccagctgctcacagagaggagggagcagaaggtcttcctacacttcgaggaggaagaaatcacgtttgccccaacctaccgttttgagagactgactcgggacaaatacgcctacaccaagcagaaagcgacagggatgaagtacaacttgccttcctggtgtgaccgagtcctctggaagtcttatcccctggtgcacgtggtgtgtcagtcttatggcagtaccagcgacatcatgacgagtgaccacagccctgtctttgccacatttgaggcaggagtcacttcccagtttgtctccaagaacggtcccgggactgttgacagccaaggacagattgagtttctcaggtgctatgccacattgaagaccaagtcccagaccaaattctacctggagttccactcgagctgcttggagagttttgtcaagagtcaggaaggagaaaatgaagaaggaagtgagggggagctggtggtgaagtttggtgagactcttccaaagctgaagcccattatctctgaccctgagtacctgctagaccagcacatcctcatcagcatcaagtcctctgacagcgacgaatcctatggcgagggctgcattgcccttcggttagaggccacagaaacgcagctgcccatctacacgcctctcacccaccatggggagttgacaggccacttccagggggagatcaagctgcagacctctcagggcaagacgagggagaagctctatgactttgtgaagacggagcgtgatgaatccagtgggccaaagaccctgaagagcctcaccagccacgaccccatgaagcagtgggaagtcactagcagggcccctccgtgcagtggctccagcatcactgaaatcatcaaccccaactacatgggagtggggccctttgggccaccaatgcccctgcacgtgaagcagaccttgtcccctgaccagcagcccacagcctggagctacgaccagccgcccaaggactccccgctggggccctgcaggggagaaagtcctccgacacctcccggccagccgcccatatcacccaagaagtttttaccctcaacagcaaaccggggtctccctcccaggacacaggagtcaaggcccagtgacctggggaagaacgcaggggacacgctgcctcaggaggacctgccgctgacgaagcccgagatgtttgagaaccccctgtatgggtccctgagttccttccctaagcctgctcccaggaaggaccaggaatcccccaaaatgccgcggaaggaacccccgccctgcccggaacccggcatcttgtcgcccagcatcgtgctcaccaaagcccaggaggctgatcgcggcgaggggcccggcaagcaggtgcccgcgccccggctgcgctccttcacgtgctcatcctctgccgagggcagggcggccggcggggacaagagccaagggaagcccaagaccccggtcagctcccaggccccggtgccggccaagaggcccatcaagccttccagatcggaaatcaaccagcagaccccgcccaccccgacgccgcggccgccgctgccagtcaagagcccggcggtgctgcacctccagcactccaagggccgcgactaccgcgacaacaccgagctcccgcatcacggcaagcaccggccggaggaggggccaccagggcctctaggcaggactgccatgcagtgaagccctcagtgagctgccactgagtcgggagcccagaggaacggcgtgaagccactggaccctctcccgggacctcctgctggctcctcctgcccagcttcctatgcaaggctttgtgttttcaggaaagggcctagcttctgtgtggcccacagagttcactgcctgtgagacttagcaccaagtgctgaggctggaagaaaaacgcacaccagacgggcaacaaacagtctgggtccccagctcgctcttggtacttgggaccccagtgcctcgttgagggcgccattctgaagaaaggaactgcagcgccgatttgagggtggagatatagataataataatattaataataataatggccacatggatcgaacactcatgatgtgccaagtgctgtgctaagtgctttacgaacattcgtcatatcaggatgacctcgagagctgaggctctagccacctaaaaccacgtgcccaaacccaccagtttaaaacggtgtgtgttcggaggggtgaaagcattaagaagcccagtgccctcctggagtgagacaagggctcggccttaaggagctgaagagtctgggtagcttgtttagggtacaagaagcctgttctgtccagcttcagtgacacaagctgctttagctaaagtcccgcgggttccggcatggctaggctgagagcagggatctacctggcttctcagttctttggttggaaggagcaggaaatcagctcctattctccagtggagagatctggcctcagcttgggctagagatgccaaggcctgtgccaggttccctgtgccctcctcgaggtgggcagccatcaccagccacagttaagccaagccccccaacatgtattccatcgtgctggtagaagagtctttgctgttgctcccgaaagccgtgctctccagcctggctgccagggagggtgggcctcttggttccaggctcttgaaatagtgcagccttttcttcctatctctgtggctttcagctctgcttccttggttattaggagaatagatgggtgatgtctttccttatgttgctttttcaacatagcagaattaatgtagggagctaaatccagtggtgtgtgtgaatgcagaagggaatgcaccccacattcccatgatggaagtctgcgtaaccaataaattgtgcctttctcactcagctgtgtgtgtggcgtttttcctgacattcggagccatagatatccttctagatggcagggcctgcacagggcacaactgaggcagttaagggttcatggtggtgatggatggtgttgccctgaccagatgggacaccatagagccagtttgaagctggtcctggactaggaacaggagtaaaccgcaccccttccttccttccacccacacatcttcctggcactccaagcaccctgcggccacccagaggccacgagcatcccctccaaacctgctgtcctgcagcccacaagttcctcccagcttttataagttt

SEQ ID NO: 106 - protein, 799 aa, Homosapiens [sequence omitted]

SEQ ID NO: 107 - DNA, 467 bp, Homosapiens
aaagggtagagagtgggtctcgctgggggaggggaggcagggagaggctgtccagctcactcgcatttgtttctttccttgattctgtttgtcacaggtttgtccatttaatctcctgcaagcacccactcttgctctatcttcttggcagccgagaggttaagaaagcccctccatgtggcagactcctttagatcagatcctttagctgccgggtccccacctaaatgaccccccccaaccttttcctggtgctccctgagtgcagaagcagtgggggaataagagtgcctcagcccacgattgctggacgtcaggactcacctccatcttaagagaacggtcagctccgaaattcggagactttgtgtccagattcctcaagctgtgtcaggaagtcttgtcttttcagttaagaggaaaccgggtcttcctgcatgggttctaataaagtctttgatctattt

SEQ ID NO: 108 - protein, 35 aa, Homosapiens
MTPPNLFLVLPECRSSGGIRVPQPTIAGRQDSPPS

SEQ ID NO: 109 - DNA, 664 bp, Homosapiens
aagagagaaggcttctgccagctcctgcagcagatgaagaacaagcactcagagcagccggagcccgacatgatcaccatcttcatcggcacctggaactgggcctcttggttccaggctcttgaaatagtgcagccttttcttcctatctctgtggctttcagctctgcttccttggttattaggagaatagatgggtgatgtctttccttatgttgctttttcaacatagcagaattaatgtagggagctaaatccagtggtgtgtgtgaatgcagaagggaatgcaccccacattcccatgatggaagtctgcgtaaccaataaattgtgcctttctcactcagctgtgtgtgtggcgtttttcctgacattcggagccatagatatccttctagatggcagggcctgcacagggcacaactgaggcagttaagggttcatggtggtgatggatggtgttgccctgaccagatgggacaccatagagccagtttgaagctggtcctggactaggaacaggagtaaaccgcaccccttccttccttccacccacacatcttcctggcactccaagcaccctgcggccacccagaggccacgagcatcccctccaaacctgctgtcctgcagcccacaagttcctcccagcttttataagttt

SEQ ID NO: 110 - protein, 55 aa, Homosapiens
MKNKHSEQPEPDMITIFIGTWNWASWFQALEIVQPFLPISVAFSSASLVIRRIDG

SEQ ID NO: 111 - DNA, 1391 bp, Homosapiens
cagtggctcatgcctgtaatcccagaactttgggaggcccaggcaggcagatcacctggcgaaactcagttgcaaaacaaatttataataacaatgagatataaatgatttaggctccttttctttatggaatcttcttcctctgggactgacactagactaagtttatccacagccccgcctttcttccttttaacaactgctgcagaggcaatgcagggtcagggatgtgtgggacaggcagacctgggttcaaatcctgactctcccttctcatggagcagttcccaggaccatcactcgcatgtgtgcacatgcatgcgttcacacatgcacgcacatatgcatgcgtgcacacacacatgcacacacatatgcataggtacacacatacgcactcacgcatgcacacacacacaaatgcacacgaacccacgtgtggcgcagcgcacctgcatggcagtcctgcctagaggccctggtggcccctcctccggccggtgcttgccgtgatgcgggagctcggtgttgtcgcggtagtcgcggcccttggagtgctggaggtgcagcaccgccgggctcttgactggcagcggcggccgcggcgtcggggtgggcggggtctgctggttgatttccgatctggaaggcttgatgggcctcttggccggcaccggggcctgggagctgaccggggtcttgggcttcccttggctcttgtccccgccggccgccctgccctcggcagaggatgagcacgtgaaggagcgcagccggggcgcgggcacctgcttgccgggcccctcgccgcgatcagcctcctgggctttggtgagcacgatgctgggcgacaagatgccgggttccgggcagggcgggggttccttccgcggcattttgggggattcctggtccttcctgggagcaggcttagggaaggaactcagggacccatacagggggttctcaaacatctcgggcttcgtcagcggcaggtcctcctgaggcagcgtgtcccctgcgttcttccccaggtcactgggcctagagccagggacagagcagggaagacacatgtccaggggagaagacatgggagcatggctgcttaatggctctgggtctttctttggggtgatacaaatgtttctgaactagatagagacatgtaacattgcaaatttactgaatggcaccaaattgttttgtcttgttttgttttagagacagagtctcgctctgtcacccaggctggagtgcagtggtgcggtcatggctcactgctgcctcaacctcttgggctcaagcagtccttcccctcagcctcccaagtagctgagactacttgggagtagctgggagtagctaggagtagctggacattgctggga

SEQ ID NO: 112 - protein, 32 aa, Homosapiens
MPVIPELWEAQAGRSPGETQLQNKFIITMRYK

SEQ ID NO: 113 - DNA, 827 bp, Homosapiens
ggaaagggcctagcttctgtgtggcccacagagttcactgcctgtgagacttagcaccaagtgctgaggctggaagaaaaacgcacaccagacgggcaacaaacagtctgggtccccagctcgctcttggtacttgggaccccagtgcctcgttgagggcgccattctgaagaaaggaactgcagcgccgatttgagggtggagatatagataataataatattaataataataatggccacatggatcgaacactcatgatgtgccaagtgctgtgctaagtgctttacgaacattcgtcatatcaggatgacctcgagagctgaggctctagccacctaaaaccacgtgcccaaacccaccagtttaaaacggtgtgtgttcggaggggtgaaagcattaagaagcccagtgccctcctggagtgagacaagggctcggccttaaggagctgaagagtgggcagccatcaccagccacagttaagccaagccccccaacatgtattccatcgtgctggtagaagagtctttgctgttgctcccgaaagccgtgctctccagcctggctgccagggagggtgggcctcttggttccaggctcttgaaatagtgcagccttttcttcctatctctgtggctttcagctctgcttccttggttattaggagaatagatgggtgatgtctttccttatgttgctttttcaacatagcagaattaatgtagggagctaaatccagtggtgtgtgtgaatgcagaagggaatgcaccccacattcccatgatggaagtctgcgtaaccaataaattgtgcctttctcactc

SEQ ID NO: 114 - protein, 36 aa, Homosapiens
MYSIVLVEESLLLLPKAVLSSLAAREGGPLGSRLLK

SEQ ID NO: 115 - DNA, 3350 bp, Homosapiens
gggcgggtcttccggccctctcgaaaatcatttccggcatgagccggaagaccgtcccggatggcctcggggactgccagtgtgtggaggtgagctccgggattgccggcattcccgcttctgctggttgcttcatgctgcaggctgcggccgtcagccctcgctcgcattggtggcgctgaggtgccggggcagcaagtgacatgtcgtcgggcctccgcgccgctgacttcccccgctggaagcgccacatctcggagcaactgaggcgccgggaccggctgcagagacaggcgttcgaggagatcatcctgcagtataacaaattgctggaaaagtcagatcttcattcagtgttggcccagaaactacaggctgaaaagcatgacgtaccaaacaggcacgagataagtcccggacatgatggcacatggaatgacaatcagctacaagaaatggcccaactgaggattaagcaccaagaggaactgactgaattacacaagaaacgtggggagttagctcaactggtgattgacctgaataaccaaatgcagcggaaggacagggagatgcagatgaatgaagcaaaaattgcagaatgtttgcagactatctctgacctggagacggagtgcctagacctgcgcactaagctttgtgaccttgaaagagccaaccagaccctgaaggatgaatatgatgccctgcagatcacttttactgccttggagggaaaactgaggaaaactacggaagagaaccaggagctggtcaccagatggatggctgagaaagcccaggaagccaatcggcttaatgcagagaatgaaaaagactccaggaggcggcaagcccggctgcagaaagagcttgcagaagcagcaaaggaacctctaccagtcgaacaggatgatgacattgaggtcattgtggatgaaacttctgatcacacagaagagacctctcctgtgcgagccatcagcagagcagccactaagcgactctcgcagcctgctggaggccttctggattctatcactaatatctttgggagacgctctgtctcttccttcccagtcccccaggacaatgtggatactcatcctggttctggtaaagaagtgagggtaccagctactgccttgtgtgtcttcgatgcacatgatggggaagtcaacgctgtgcagttcagtccaggttcccggttactggccactggaggcatggaccgcagggttaagctttgggaagtatttggagaaaaatgtgagttcaagggttccctatctggcagtaatgcaggaattacaagcattgaatttgatagtgctggatcttacctcttagcagcttcaaatgattttgcaagccgaatctggactgtggatgattatcgattacggcacacactcacgggacacagtgggaaagtgctgtctgctaagttcctgctggacaatgcgcggattgtctcaggaagtcacgaccggactctcaaactctgggatctacgcagcaaagtctgcataaagacagtgtttgcaggatccagttgcaatgatattgtctgcacagagcaatgtgtaatgagtggacattttgacaagaaaattcgtttctgggacattcgatcagagagcatagttcgagagatggagctgttgggaaagattactgccctggacttaaacccagaaaggactgagctcctgagctgctcccgtgatgacttgctaaaagttattgatctccgaacaaatgctatcaagcagacattcagtgcacctgggttcaagtgcggctctgactggaccagagttgtcttcagccctgatggcagttacgtggcggcaggctctgctgagggctctctgtatatctggagtgtgctcacagggaaagtggaaaaggttctttcaaagcagcacagctcatccatcaatgcggtggcgtggtcgccctctggctcgcacgttgtcagtgtggacaaaggatgcaaagctgtgctgtgggcacagtactgacggggctctcagggctgggaggaccccagtgccctcctcagaagaagcacatgggctcctgcagccctgtcctggcaggtgatgtgctgggtatagcatggacctcccagagaagctcaagctatgtggcactgtagctttgccgtgaatgggatttctgaagatttgactgaggtctctcttggcctggaagaataacactgaaaaaacctgacgctgcggtcacttagcagaggctcaggttcttgccttgggaaacactactagctctgaccttccatacctcacttgggggagcacagggccccgctgggcctcctcaccaacggcagtgccaaaatcagcccccacatcaaggtggtgttctctgtgctttctctcgtccttccaaagtcggttctggcctaacgcatgtcccaacaccttgggttcatttgcccggtgaactcactttaagcattggattaacggaaactcccgaactacagacccctccctggtgggttgcatgaatgtgtctcattactgctgaaatgtcctcacatctctttcactgttcttcagagctttctggctctctttcccccacaaaattcgacatatttaaaaatctccgtgtggctttaaaaaatggttttttgtttttttgtttttttgaggtgggagaggatgtgtgaaaatcttttccagggaaatgggttcgctgcagaggtaaggatgtgttcctgtatcgatctgcagacacccagaaggtgggtgcacactgcatgcttgggggtgccaagggattcgagacctccaacatacttgtctgaaggtggtgattctggccatggcccctctgccaagcctgtgtgcgatgcccttggtgctttagtgcaagaagcctaggctcagaagcacagcagcgccatctttccgtttcaggggttgtgatgaaggccaaggaaaaacatttatctttactattttacctacgtataaagttttagttcattgggtgtgcgaaacaccctttttatcacttttaaatttgcactttattttttttcttccatgcttgttctctggacatttggggatgtgagtgttagagctggtgagagaggagtcaggtggccttcccaccgatggtcctggcctccacctgccctctcttccctgcctgatcaccgctttccaatttgcccttcagagaacttaagtcaaggagagttgaaattcacaggccagggcacatcttttatttatttcattatgttggccaacagaacttgattgtaaataataataaagaaatctgttatatacttttcaaactcc

SEQ ID NO: 116 - protein, 607 aa, Homosapiens
MSSGLRAADFPRWKRHISEQLRRRDRLQRQAFEEIILQYNKLLEKSDLHSVLAQKLQAEKHDVPNRHEISPGHDGTWNDNQLQEMAQLRIKHQEELTELHKKRGELAQLVIDLNNQMQRKDREMQMNEAKIAECLQTISDLETECLDLRTKLCDLERANQTLKDEYDALQITFTALEGKLRKTTEENQELVTRWMAEKAQEANRLNAENEKDSRRRQARLQKELAEAAKEPLPVEQDDDIEVIVDETSDHTEETSPVRAISRAATKRLSQPAGGLLDSITNIFGRRSVSSFPVPQDNVDTHPGSGKEVRVPATALCVFDAHDGEVNAVQFSPGSRLLATGGMDRRVKLWEVFGEKCEFKGSLSGSNAGITSIEFDSAGSYLLAASNDFASRIWTVDDYRLRHTLTGHSGKVLSAKFLLDNARIVSGSHDRTLKLWDLRSKVCIKTVFAGSSCNDIVCTEQCVMSGHFDKKIRFWDIRSESIVREMELLGKITALDLNPERTELLSCSRDDLLKVIDLRTNAIKQTFSAPGFKCGSDWTRVVFSPDGSYVAAGSAEGSLYIWSVLTGKVEKVLSKQHSSSINAVAWSPSGSHVVSVDKGCKAVLWAQY

SEQ ID NO: 117 - DNA, 3623 bp, Homosapiens
gggcgggtcttccggccctctcgaaaatcatttccggcatgagccggaagaccgtcccggatggcctcggggactgccagtgtgtggaggtgagctccgggattgccggcattcccgcttctgctggttgcttcatgctgcaggctgcggccgtcagccctcgctcgcattggtggcgctgaggtgccggggcagcaagtgacatgtcgtcgggcctccgcgccgctgacttcccccgctggaagcgccacatctcggagcaactgaggcgccgggaccggctgcagagacaggcgttcgaggagatcatcctgcagtataacaaattgctggaaaagtcagatcttcattcagtgttggcccagaaactacaggctgaaaagcatgacgtaccaaacaggcacgagataagtcccggacatgatggcacatggaatgacaatcagctacaagaaatggcccaactgaggattaagcaccaagaggaactgactgaattacacaagaaacgtggggagttagctcaactggtgattgacctgaataaccaaatgcagcggaaggacagggagatgcagatgaatgaagcaaaaattgcagaatgtttgcagactatctctgacctggagacggagtgcctagacctgcgcactaagctttgtgaccttgaaagagccaaccagaccctgaaggatgaatatgatgccctgcagatcacttttactgccttggagggaaaactgaggaaaactacggaagagaaccaggagctggtcaccagatggatggctgagaaagcccaggaagccaatcggcttaatgcagagaatgaaaaagactccaggaggcggcaagcccggctgcagaaagagcttgcagaagcagcaaaggaacctctaccagtcgaacaggatgatgacattgaggtcattgtggatgaaacttctgatcacacagaagagacctctcctgtgcgagccatcagcagagcagccactaagcgactctcgcagcctgctggaggccttctggattctatcactaatatctttgggagacgctctgtctcttccttcccagtcccccaggacaatgtggatactcatcctggttctggtaaagaagtgagggtaccagctactgccttgtgtgtcttcgatgcacatgatggggaagtcaacgctgtgcagttcagtccaggttcccggttactggccactggaggcatggaccgcagggttaagctttgggaagtatttggagaaaaatgtgagttcaagggttccctatctggcagtaatgcaggaattacaagcattgaatttgatagtgctggatcttacctcttagcagcttcaaatgattttgcaagccgaatctggactgtggatgattatcgattacggcacacactcacgggacacagtgggaaagtgctgtctgctaagttcctgctggacaatgcgcggattgtctcaggaagtcacgaccggactctcaaactctgggatctacgcagcaaagtctgtgaggaaattcagtctctctgtctgtgtatatgcttagatgttagcgtggaggtgtgtgtttgcacgtcagagcctgcatttatgtaatatagtttgaatttcagatctggcttcatgtttagaggggcactgaggatagtgatagtttttcttgtttaaagcttcatttaagtgagtaactctgacaagtcagtggttagagggtggcagcattatgtaaacagccacgttggtgcctctgcttgattaatgatgtttgcatttctttcaggcataaagacagtgtttgcaggatccagttgcaatgatattgtctgcacagagcaatgtgtaatgagtggacattttgacaagaaaattcgtttctgggacattcgatcagagagcatagttcgagagatggagctgttgggaaagattactgccctggacttaaacccagaaaggactgagctcctgagctgctcccgtgatgacttgctaaaagttattgatctccgaacaaatgctatcaagcagacattcagtgcacctgggttcaagtgcggctctgactggaccagagttgtcttcagccctgatggcagttacgtggcggcaggctctgctgagggctctctgtatatctggagtgtgctcacagggaaagtggaaaaggttctttcaaagcagcacagctcatccatcaatgcggtggcgtggtcgccctctggctcgcacgttgtcagtgtggacaaaggatgcaaagctgtgctgtgggcacagtactgacggggctctcagggctgggaggaccccagtgccctcctcagaagaagcacatgggctcctgcagccctgtcctggcaggtgatgtgctgggtatagcatggacctcccagagaagctcaagctatgtggcactgtagctttgccgtgaatgggatttctgaagatttgactgaggtctctcttggcctggaagaataacactgaaaaaacctgacgctgcggtcacttagcagaggctcaggttcttgccttgggaaacactactagctctgaccttccatacctcacttgggggagcacagggccccgctgggcctcctcaccaacggcagtgccaaaatcagcccccacatcaaggtggtgttctctgtgctttctctcgtccttccaaagtcggttctggcctaacgcatgtcccaacaccttgggttcatttgcccggtgaactcactttaagcattggattaacggaaactcccgaactacagacccctccctggtgggttgcatgaatgtgtctcattactgctgaaatgtcctcacatctctttcactgttcttcagagctttctggctctctttcccccacaaaattcgacatatttaaaaatctccgtgtggctttaaaaaatggttttttgtttttttgtttttttgaggtgggagaggatgtgtgaaaatcttttccagggaaatgggttcgctgcagaggtaaggatgtgttcctgtatcgatctgcagacacccagaaggtgggtgcacactgcatgcttgggggtgccaagggattcgagacctccaacatacttgtctgaaggtggtgattctggccatggcccctctgccaagcctgtgtgcgatgcccttggtgctttagtgcaagaagcctaggctcagaagcacagcagcgccatctttccgtttcaggggttgtgatgaaggccaaggaaaaacatttatctttactattttacctacgtataaagttttagttcattgggtgtgcgaaacaccctttttatcacttttaaatttgcactttattttttttcttccatgcttgttctctggacatttggggatgtgagtgttagagctggtgagagaggagtcaggtggccttcccaccgatggtcctggcctccacctgccctctcttccctgcctgatcaccgctttccaatttgcccttcagagaacttaagtcaaggagagttgaaattcacaggccagggcacatcttttatttatttcattatgttggccaacagaacttgattgtaaataataataaagaaatctgttatatacttttcaaactcc

SEQ ID NO: 118 - protein, 470 aa, Homosapiens
MSSGLRAADFPRWKRHISEQLRRRDRLQRQAFEEIILQYNKLLEKSDLHSVLAQKLQAEKHDVPNRHEISPGHDGTWNDNQLQEMAQLRIKHQEELTELHKKRGELAQLVIDLNNQMQRKDREMQMNEAKIAECLQTISDLETECLDLRTKLCDLERANQTLKDEYDALQITFTALEGKLRKTTEENQELVTRWMAEKAQEANRLNAENEKDSRRRQARLQKELAEAAKEPLPVEQDDDIEVIVDETSDHTEETSPVRAISRAATKRLSQPAGGLLDSITNIFGRRSVSSFPVPQDNVDTHPGSGKEVRVPATALCVFDAHDGEVNAVQFSPGSRLLATGGMDRRVKLWEVFGEKCEFKGSLSGSNAGITSIEFDSAGSYLLAASNDFASRIWTVDDYRLRHTLTGHSGKVLSAKFLLDNARIVSGSHDRTLKLWDLRSKVCEEIQSLCLCICLDVSVEVCVCTSEPAFM

SEQ ID NO: 119 - DNA, 4291 bp, Homosapiens
gggcgggtcttccggccctctcgaaaatcatttccggcatgagccggaagaccgtcccggatggcctcggggactgccagtgtgtggaggtgagctccgggattgccggcattcccgcttctgctggttgcttcatgctgcaggctgcggccgtcagccctcgctcgcattggtggcgctgaggtgccggggcagcaagtgacatgtcgtcgggcctccgcgccgctgacttcccccgctggaagcgccacatctcggagcaactgaggcgccgggaccggctgcagagacaggcgttcgaggagatcatcctgcagtataacaaattgctggaaaagtcagatcttcattcagtgttggcccagaaactacaggctgaaaagcatgacgtaccaaacaggcacgagataagtcccggacatgatggcacatggaatgacaatcagctacaagaaatggcccaactgaggattaagcaccaagaggaactgactgaattacacaagaaacgtggggagttagctcaactggtgattgacctgaataaccaaatgcagcggaaggacagggagatgcagatgaatgaagcaaaaattgcagaatgtttgcagactatctctgacctggagacggagtgcctagacctgcgcactaagctttgtgaccttgaaagagccaaccagaccctgaaggatgaatatgatgccctgcagatcacttttactgccttggagggaaaactgaggaaaactacggaagagaaccaggagctggtcaccagatggatggctgagaaagcccaggaagccaatcggcttaatgcagagaatgaaaaagactccaggaggcggcaagcccggctgcagaaagagcttgcagaagcagcaaaggaacctctaccagtcgaacaggatgatgacattgaggtcattgtggatgaaacttctgatcacacagaagagacctctcctgtgcgagccatcagcagagcagccacgtaagtaggcaggtttgggccagggaaaagacagcttgaggagcaatatgaaggcacatctgtggacatgacaaagaatgcagtcagatgcacccaaccccttaccccttttctgggacacccagcgtcgaacacaccacagaggtgtccagtctttctcagttcacctctgcttaatgggagggaagcagaacacgggtggcttcaaatgcttctaaatacaaaaaaatgtagtggcttactcaaatatggacagtgaaaccttattaagcagaatgattgtttaggtttgatcatcctgtttcattcttactagggcttccccccgcccgcaccgcccttcaagagtggggattggttactaacagtcagaaattgtgaagttagttagccaggaattgtgaggttagttgtctaatgctttatttccagggaaattaatttaatactagggaaccttgtttcttttgaaacttctaggctgggttttccctttcccttcccactgttttctggcagtttggtactgtgttgggtttctcttggctggggtttgggaactaagtgggaaacatattcccagttacctgtttttgtgggctgtttattgattgattatttgggcaaaatgtttctaaggtttaaacctatcctcccctcctctttagtaagcgactctcgcagcctgctggaggccttctggattctatcactaatatctttgggagacgctctgtctcttccttcccagtcccccaggacaatgtggatactcatcctggttctggtaaagaagtgagggtaccagctactgccttgtgtgtcttcgatgcacatgatggggaagtcaacgctgtgcagttcagtccaggttcccggttactggccactggaggcatggaccgcagggttaagctttgggaagtatttggagaaaaatgtgagttcaagggttccctatctggcagtaatgcaggaattacaagcattgaatttgatagtgctggatcttacctcttagcagcttcaaatgattttgcaagccgaatctggactgtggatgattatcgattacggcacacactcacgggacacagtgggaaagtgctgtctgctaagttcctgctggacaatgcgcggattgtctcaggaagtcacgaccggactctcaaactctgggatctacgcagcaaagtctgtgaggaaattcagtctctctgtctgtgtatatgcttagatgttagcgtggaggtgtgtgtttgcacgtcagagcctgcatttatgtaatatagtttgaatttcagatctggcttcatgtttagaggggcactgaggatagtgatagtttttcttgtttaaagcttcatttaagtgagtaactctgacaagtcagtggttagagggtggcagcattatgtaaacagccacgttggtgcctctgcttgattaatgatgtttgcatttctttcaggcataaagacagtgtttgcaggatccagttgcaatgatattgtctgcacagagcaatgtgtaatgagtggacattttgacaagaaaattcgtttctgggacattcgatcagagagcatagttcgagagatggagctgttgggaaagattactgccctggacttaaacccagaaaggactgagctcctgagctgctcccgtgatgacttgctaaaagttattgatctccgaacaaatgctatcaagcagacattcagtgcacctgggttcaagtgcggctctgactggaccagagttgtcttcagccctgatggcagttacgtggcggcaggctctgctgagggctctctgtatatctggagtgtgctcacagggaaagtggaaaaggttctttcaaagcagcacagctcatccatcaatgcggtggcgtggtcgccctctggctcgcacgttgtcagtgtggacaaaggatgcaaagctgtgctgtgggcacagtactgacggggctctcagggctgggaggaccccagtgccctcctcagaagaagcacatgggctcctgcagccctgtcctggcaggtgatgtgctgggtatagcatggacctcccagagaagctcaagctatgtggcactgtagctttgccgtgaatgggatttctgaagatttgactgaggtctctcttggcctggaagaataacactgaaaaaacctgacgctgcggtcacttagcagaggctcaggttcttgccttgggaaacactactagctctgaccttccatacctcacttgggggagcacagggccccgctgggcctcctcaccaacggcagtgccaaaatcagcccccacatcaaggtggtgttctctgtgctttctctcgtccttccaaagtcggttctggcctaacgcatgtcccaacaccttgggttcatttgcccggtgaactcactttaagcattggattaacggaaactcccgaactacagacccctccctggtgggttgcatgaatgtgtctcattactgctgaaatgtcctcacatctctttcactgttcttcagagctttctggctctctttcccccacaaaattcgacatatttaaaaatctccgtgtggctttaaaaaatggttttttgtttttttgtttttttgaggtgggagaggatgtgtgaaaatcttttccagggaaatgggttcgctgcagaggtaaggatgtgttcctgtatcgatctgcagacacccagaaggtgggtgcacactgcatgcttgggggtgccaagggattcgagacctccaacatacttgtctgaaggtggtgattctggccatggcccctctgccaagcctgtgtgcgatgcccttggtgctttagtgcaagaagcctaggctcagaagcacagcagcgccatctttccgtttcaggggttgtgatgaaggccaaggaaaaacatttatctttactattttacctacgtataaagttttagttcattgggtgtgcgaaacaccctttttatcacttttaaatttgcactttattttttttcttccatgcttgttctctggacatttggggatgtgagtgttagagctggtgagagaggagtcaggtggccttcccaccgatggtcctggcctccacctgccctctcttccctgcctgatcaccgctttccaatttgcccttcagagaacttaagtcaaggagagttgaaattcacaggccagggcacatcttttatttatttcattatgttggccaacagaacttgattgtaaataataataaagaaatctgttatatacttttcaaactcc

SEQ ID NO: 120 - protein, 265 aa, Homosapiens [sequence omitted]

SEQ ID NO: 121 - DNA, 3293 bp, Homosapiens
gggcgggtcttccggccctctcgaaaatcatttccggcatgagccggaagaccgtcccggatggcctcggggactgccagtgtgtggaggtgagctccgggattgccggcattcccgcttctgctggttgcttcatgctgcaggctgcggccgtcagccctcgctcgcattggtggcgctgaggtgccggggcagcaagtgacatgtcgtcgggcctccgcgccgctgacttcccccgctggaagcgccacatctcggagcaactgaggcgccgggaccggctgcagagacaggcgttcgaggagatcatcctgcagtataacaaattgctggaaaagtcagatcttcattcagtgttggcccagaaactacaggctgaaaagcatgacgtaccaaacaggcacgagataagtcccggacatgatggcacatggaatgacaatcagctacaagaaatggcccaactgaggattaagcaccaagaggaactgactgaattacacaagaaacgtggggagttagctcaactggtgattgacctgaataaccaaatgcagcggaaggacagggagatgcagatgaatgaagcaaaaattgcagaatgtttgcagactatctctgacctggagacggagtgcctagacctgcgcactaagctttgtgaccttgaaagagccaaccagaccctgaaggatgaatatgatgccctgcagatcacttttactgccttggagggaaaactgaggaaaactacggaagagaaccaggagctggtcaccagatggatggctgagaaagcccaggaagccaatcggcttaatgcagagaatgaaaaagactccaggaggcggcaagcccggctgcagaaagagcttgcagaagcagcaaaggaacctctaccagtcgaacaggatgatgacattgaggtcattgtggatgaaacttctgatcacacagaagagacctctcctgtgcgagccatcagcagagcagccacgagacgctctgtctcttccttcccagtcccccaggacaatgtggatactcatcctggttctggtaaagaagtgagggtaccagctactgccttgtgtgtcttcgatgcacatgatggggaagtcaacgctgtgcagttcagtccaggttcccggttactggccactggaggcatggaccgcagggttaagctttgggaagtatttggagaaaaatgtgagttcaagggttccctatctggcagtaatgcaggaattacaagcattgaatttgatagtgctggatcttacctcttagcagcttcaaatgattttgcaagccgaatctggactgtggatgattatcgattacggcacacactcacgggacacagtgggaaagtgctgtctgctaagttcctgctggacaatgcgcggattgtctcaggaagtcacgaccggactctcaaactctgggatctacgcagcaaagtctgcataaagacagtgtttgcaggatccagttgcaatgatattgtctgcacagagcaatgtgtaatgagtggacattttgacaagaaaattcgtttctgggacattcgatcagagagcatagttcgagagatggagctgttgggaaagattactgccctggacttaaacccagaaaggactgagctcctgagctgctcccgtgatgacttgctaaaagttattgatctccgaacaaatgctatcaagcagacattcagtgcacctgggttcaagtgcggctctgactggaccagagttgtcttcagccctgatggcagttacgtggcggcaggctctgctgagggctctctgtatatctggagtgtgctcacagggaaagtggaaaaggttctttcaaagcagcacagctcatccatcaatgcggtggcgtggtcgccctctggctcgcacgttgtcagtgtggacaaaggatgcaaagctgtgctgtgggcacagtactgacggggctctcagggctgggaggaccccagtgccctcctcagaagaagcacatgggctcctgcagccctgtcctggcaggtgatgtgctgggtatagcatggacctcccagagaagctcaagctatgtggcactgtagctttgccgtgaatgggatttctgaagatttgactgaggtctctcttggcctggaagaataacactgaaaaaacctgacgctgcggtcacttagcagaggctcaggttcttgccttgggaaacactactagctctgaccttccatacctcacttgggggagcacagggccccgctgggcctcctcaccaacggcagtgccaaaatcagcccccacatcaaggtggtgttctctgtgctttctctcgtccttccaaagtcggttctggcctaacgcatgtcccaacaccttgggttcatttgcccggtgaactcactttaagcattggattaacggaaactcccgaactacagacccctccctggtgggttgcatgaatgtgtctcattactgctgaaatgtcctcacatctctttcactgttcttcagagctttctggctctctttcccccacaaaattcgacatatttaaaaatctccgtgtggctttaaaaaatggttttttgtttttttgtttttttgaggtgggagaggatgtgtgaaaatcttttccagggaaatgggttcgctgcagaggtaaggatgtgttcctgtatcgatctgcagacacccagaaggtgggtgcacactgcatgcttgggggtgccaagggattcgagacctccaacatacttgtctgaaggtggtgattctggccatggcccctctgccaagcctgtgtgcgatgcccttggtgctttagtgcaagaagcctaggctcagaagcacagcagcgccatctttccgtttcaggggttgtgatgaaggccaaggaaaaacatttatctttactattttacctacgtataaagttttagttcattgggtgtgcgaaacaccctttttatcacttttaaatttgcactttattttttttcttccatgcttgttctctggacatttggggatgtgagtgttagagctggtgagagaggagtcaggtggccttcccaccgatggtcctggcctccacctgccctctcttccctgcctgatcaccgctttccaatttgcccttcagagaacttaagtcaaggagagttgaaattcacaggccagggcacatcttttatttatttcattatgttggccaacagaacttgattgtaaataataataaagaaatctgttatatacttttcaaactcc

SEQ ID NO: 122 - protein, 588 aa, Homosapiens
MSSGLRAADFPRWKRHISEQLRRRDRLQRQAFEEIILQYNKLLEKSDLHSVLAQKLQAEKHDVPNRHEISPGHDGTWNDNQLQEMAQLRIKHQEELTELHKKRGELAQLVIDLNNQMQRKDREMQMNEAKIAECLQTISDLETECLDLRTKLCDLERANQTLKDEYDALQITFTALEGKLRKTTEENQELVTRWMAEKAQEANRLNAENEKDSRRRQARLQKELAEAAKEPLPVEQDDDIEVIVDETSDHTEETSPVRAISRAATRRSVSSFPVPQDNVDTHPGSGKEVRVPATALCVFDAHDGEVNAVQFSPGSRLLATGGMDRRVKLWEVFGEKCEFKGSLSGSNAGITSIEFDSAGSYLLAASNDFASRIWTVDDYRLRHTLTGHSGKVLSAKFLLDNARIVSGSHDRTLKLWDLRSKVCIKTVFAGSSCNDIVCTEQCVMSGHFDKKIRFWDIRSESIVREMELLGKITALDLNPERTELLSCSRDDLLKVIDLRTNAIKQTFSAPGFKCGSDWTRVVFSPDGSYVAAGSAEGSLYIWSVLTGKVEKVLSKQHSSSINAVAWSPSGSHVVSVDKGCKAVLWAQY

SEQ ID NO: 123 - DNA, 3976 bp, Homosapiens
gggcgggtcttccggccctctcgaaaatcatttccggcatgagccggaagaccgtcccggatggcctcggggactgccagtgtgtggaggtgagctccgggattgccggcattcccgcttctgctggttgcttcatgctgcaggctgcggccgtcagccctcgctcgcattggtggcgctgaggtgccggggcagcaagtgacatgtcgtcgggcctccgcgccgctgacttcccccgctggaagcgccacatctcggagcaactgaggcgccgggaccggctgcagagacaggcgttcgaggagatcatcctgcagtataacaaattgctggaaaagtcagatcttcattcagtgttggcccagaaactacaggctgaaaagcatgacgtaccaaacaggcacgagataagtcccggacatgatggcacatggaatgacaatcagctacaagaaatggcccaactgaggattaagcaccaagaggaactgactgaattacacaagaaacgtggggagttagctcaactggtgattgacctgaataaccaaatgcagcggaaggacagggagatgcagatgaatgaagcaaaaattgcagaatgtttgcagactatctctgacctggagacggagtgcctagacctgcgcactaagctttgtgaccttgaaagagccaaccagaccctgaaggatgaatatgatgccctgcagatcacttttactgccttggagggaaaactgaggaaaactacggaagagaaccaggagctggtcaccagatggatggctgagaaagcccaggaagccaatcggcttaatgcagagaatgaaaaagactccaggaggcggcaagcccggctgcagaaagagcttgcagaagcagcaaaggaacctctaccagtcgaacaggatgatgacattgaggtcattgtggatgaaacttctgatcacacagaagagacctctcctgtgcgagccatcagcagagcagccactaagcgactctcgcagcctgctggaggccttctggattctatcactaatatctttgggagacgctctgtctcttccttcccagtcccccaggacaatgtggatactcatcctggttctggtaaagaagtgagggtaccagctactgccttgtgtgtcttcgatgcacatgatggggaagtcaacgctgtgcagttcagtccaggttcccggttactggccactggaggcatggaccgcagggttaagctttgggaagtatttggagaaaaatgtgagttcaagggttccctatctggcagtaatgcaggaattacaagcattgaatttgatagtgctggatcttacctcttagcagcttcaaatgattttgcaagccgaatctggactgtggatgattatcgattacggcacacactcacgggacacagtgggaaagtgctgtctgctaagttcctgctggacaatgcgcggattgtctcaggaagtcacgaccggactctcaaactctgggatctacgcagcaaagtctgtgaggaaattcagtctctctgtctgtgtatatgcttagatgttagcgtggaggtgtgtgtttgcacgtcagagcctgcatttatgtaatatagtttgaatttcagatctggcttcatgtttagaggggcactgaggatagtgatagtttttcttgtttaaagcttcatttaagtgagtaactctgacaagtcagtggttagagggtggcagcattatgtaaacagccacgttggtgcctctgcttgattaatgatgtttgcatttctttcaggcataaagacagtgtttgcaggatccagttgcaatgatattgtctgcacagagcaatgtgtaatgagtggacattttgacaagaaaattcgtttctgggacattcgatcagagagcatagttcgagagatggagctgttgggaaagattactgccctggacttaaacccagaaaggactgagctcctgagctgctcccgtgatgacttgctaaaagttattgatctccgaacaaatgctatcaagcagacattcagtgcacctgggttcaagtgcggctctgactggaccagagttgtcttcagccctgatggcagttacgtggcggcaggctctgctgagggctctctgtatatctggagtgtgctcacagggaaagtggaaaaggttctttcaaagcagcacagctcatccatcaatgcggtggcgtggtcgccctctggctcgcacgttgtcagtgtggacaaaggatgcaaagctgtgctgtgggcacagtactgacggggctctcagggctgggaggaccccagtgccctcctcagaagaagcacatgggctcctgcagccctgtcctggcaggtgatgtgctgggtatagcatggacctcccagagaagctcaagctatgtggcactgtagctttgccgtgaatgggatttctgaagatttgactgaggtctctcttggcctggaagaataacactgaaaaaacctgacgctgcggtcacttagcagaggctcaggttcttgccttgggaaacactactagctctgaccttccatacctcacttgggggagcacagggccccgctgggcctcctcaccaacggcagtgccaaaatcagcccccacatcaaggtggtgttctctgtgctttctctcgtccttccaaagtcggttctggcctaacgcatgtcccaacaccttgggttcatttgcccggtgaactcactttaagcattggattaacggaaactcccgaactacagacccctccctggtgggttgcatgaatgtgtctcattactgctgaaatgtcctcacatctctttcactgttcttcagagctttctggctctctttcccccacaaaattcgacatatttaaaaatctccgtgtggctttaaaaaatggttttttgtttttttgtttttttgaggtgggagaggatgtgtgaaaatcttttccagggaaatgggttcgctgcagaggtaaggatgtgttcctgtatcgatctgcagacacccagaaggtgggtgcacactgcatgcttgggggtgccaagggattcgagacctccaacatacttgtctgaaggtggtgattctggccatggcccctctgccaagcctgtgtgcgatgcccttggtgctttagtgcaagaagcctaggctcagaagcacagcagcgccatctttccgtttcaggggttgtgatgaaggccaaggaaaaacatttatctttactattttacctacgtataaagttttagttcattgggtgtgcgaaacaccctttttatcacttttaaatttgcactttattttttttcttccatgcttgttctctggacatttggggatgtgagtgttagagctggtgagagaggagtcaggtggccttcccaccgatggtcctggcctccacctgccctctcttccctgcctgatcaccgctttccaatttgcccttcagagaacttaagtcaaggagagttgaaattcacaggccagggcacatcttttatttatttcattatgttggccaacagaacttgattgtaaataataataaagaaatctgttatatacttttcaaactccatgcctcttggtgattattttattctcccttatccttagaaaggggaaagaaagtgatttctttgtttacctggtagttatttgtaaacaacggctagtactttttaacggtcttttttcattcatcatgtaagctccattccacaaagtatctctctctgtaaacaccagtgttccagtttcatgtcgcgcaaatcttaacggacattggaaagatgtttcttcagaacattaccagctgcagtagaagagcccagcacggattgctcttcagccctctgcacggagcctctctccagtgaactgccgcagcagagaggcattcacttgtggtggctcagattcctgacaca

SEQ ID NO: 124 - protein, 470 aa, Homosapiens; identical to SEQ ID NO: 118

SEQ ID NO: 125 - DNA, 4644 bp, Homosapiens
gggcgggtcttccggccctctcgaaaatcatttccggcatgagccggaagaccgtcccggatggcctcggggactgccagtgtgtggaggtgagctccgggattgccggcattcccgcttctgctggttgcttcatgctgcaggctgcggccgtcagccctcgctcgcattggtggcgctgaggtgccggggcagcaagtgacatgtcgtcgggcctccgcgccgctgacttcccccgctggaagcgccacatctcggagcaactgaggcgccgggaccggctgcagagacaggcgttcgaggagatcatcctgcagtataacaaattgctggaaaagtcagatcttcattcagtgttggcccagaaactacaggctgaaaagcatgacgtaccaaacaggcacgagataagtcccggacatgatggcacatggaatgacaatcagctacaagaaatggcccaactgaggattaagcaccaagaggaactgactgaattacacaagaaacgtggggagttagctcaactggtgattgacctgaataaccaaatgcagcggaaggacagggagatgcagatgaatgaagcaaaaattgcagaatgtttgcagactatctctgacctggagacggagtgcctagacctgcgcactaagctttgtgaccttgaaagagccaaccagaccctgaaggatgaatatgatgccctgcagatcacttttactgccttggagggaaaactgaggaaaactacggaagagaaccaggagctggtcaccagatggatggctgagaaagcccaggaagccaatcggcttaatgcagagaatgaaaaagactccaggaggcggcaagcccggctgcagaaagagcttgcagaagcagcaaaggaacctctaccagtcgaacaggatgatgacattgaggtcattgtggatgaaacttctgatcacacagaagagacctctcctgtgcgagccatcagcagagcagccacgtaagtaggcaggtttgggccagggaaaagacagcttgaggagcaatatgaaggcacatctgtggacatgacaaagaatgcagtcagatgcacccaaccccttaccccttttctgggacacccagcgtcgaacacaccacagaggtgtccagtctttctcagttcacctctgcttaatgggagggaagcagaacacgggtggcttcaaatgcttctaaatacaaaaaaatgtagtggcttactcaaatatggacagtgaaaccttattaagcagaatgattgtttaggtttgatcatcctgtttcattcttactagggcttccccccgcccgcaccgcccttcaagagtggggattggttactaacagtcagaaattgtgaagttagttagccaggaattgtgaggttagttgtctaatgctttatttccagggaaattaatttaatactagggaaccttgtttcttttgaaacttctaggctgggttttccctttcccttcccactgttttctggcagtttggtactgtgttgggtttctcttggctggggtttgggaactaagtgggaaacatattcccagttacctgtttttgtgggctgtttattgattgattatttgggcaaaatgtttctaaggtttaaacctatcctcccctcctctttagtaagcgactctcgcagcctgctggaggccttctggattctatcactaatatctttgggagacgctctgtctcttccttcccagtcccccaggacaatgtggatactcatcctggttctggtaaagaagtgagggtaccagctactgccttgtgtgtcttcgatgcacatgatggggaagtcaacgctgtgcagttcagtccaggttcccggttactggccactggaggcatggaccgcagggttaagctttgggaagtatttggagaaaaatgtgagttcaagggttccctatctggcagtaatgcaggaattacaagcattgaatttgatagtgctggatcttacctcttagcagcttcaaatgattttgcaagccgaatctggactgtggatgattatcgattacggcacacactcacgggacacagtgggaaagtgctgtctgctaagttcctgctggacaatgcgcggattgtctcaggaagtcacgaccggactctcaaactctgggatctacgcagcaaagtctgtgaggaaattcagtctctctgtctgtgtatatgcttagatgttagcgtggaggtgtgtgtttgcacgtcagagcctgcatttatgtaatatagtttgaatttcagatctggcttcatgtttagaggggcactgaggatagtgatagtttttcttgtttaaagcttcatttaagtgagtaactctgacaagtcagtggttagagggtggcagcattatgtaaacagccacgttggtgcctctgcttgattaatgatgtttgcatttctttcaggcataaagacagtgtttgcaggatccagttgcaatgatattgtctgcacagagcaatgtgtaatgagtggacattttgacaagaaaattcgtttctgggacattcgatcagagagcatagttcgagagatggagctgttgggaaagattactgccctggacttaaacccagaaaggactgagctcctgagctgctcccgtgatgacttgctaaaagttattgatctccgaacaaatgctatcaagcagacattcagtgcacctgggttcaagtgcggctctgactggaccagagttgtcttcagccctgatggcagttacgtggcggcaggctctgctgagggctctctgtatatctggagtgtgctcacagggaaagtggaaaaggttctttcaaagcagcacagctcatccatcaatgcggtggcgtggtcgccctctggctcgcacgttgtcagtgtggacaaaggatgcaaagctgtgctgtgggcacagtactgacggggctctcagggctgggaggaccccagtgccctcctcagaagaagcacatgggctcctgcagccctgtcctggcaggtgatgtgctgggtatagcatggacctcccagagaagctcaagctatgtggcactgtagctttgccgtgaatgggatttctgaagatttgactgaggtctctcttggcctggaagaataacactgaaaaaacctgacgctgcggtcacttagcagaggctcaggttcttgccttgggaaacactactagctctgaccttccatacctcacttgggggagcacagggccccgctgggcctcctcaccaacggcagtgccaaaatcagcccccacatcaaggtggtgttctctgtgctttctctcgtccttccaaagtcggttctggcctaacgcatgtcccaacaccttgggttcatttgcccggtgaactcactttaagcattggattaacggaaactcccgaactacagacccctccctggtgggttgcatgaatgtgtctcattactgctgaaatgtcctcacatctctttcactgttcttcagagctttctggctctctttcccccacaaaattcgacatatttaaaaatctccgtgtggctttaaaaaatggttttttgtttttttgtttttttgaggtgggagaggatgtgtgaaaatcttttccagggaaatgggttcgctgcagaggtaaggatgtgttcctgtatcgatctgcagacacccagaaggtgggtgcacactgcatgcttgggggtgccaagggattcgagacctccaacatacttgtctgaaggtggtgattctggccatggcccctctgccaagcctgtgtgcgatgcccttggtgctttagtgcaagaagcctaggctcagaagcacagcagcgccatctttccgtttcaggggttgtgatgaaggccaaggaaaaacatttatctttactattttacctacgtataaagttttagttcattgggtgtgcgaaacaccctttttatcacttttaaatttgcactttattttttttcttccatgcttgttctctggacatttggggatgtgagtgttagagctggtgagagaggagtcaggtggccttcccaccgatggtcctggcctccacctgccctctcttccctgcctgatcaccgctttccaatttgcccttcagagaacttaagtcaaggagagttgaaattcacaggccagggcacatcttttatttatttcattatgttggccaacagaacttgattgtaaataataataaagaaatctgttatatacttttcaaactccatgcctcttggtgattattttattctcccttatccttagaaaggggaaagaaagtgatttctttgtttacctggtagttatttgtaaacaacggctagtactttttaacggtcttttttcattcatcatgtaagctccattccacaaagtatctctctctgtaaacaccagtgttccagtttcatgtcgcgcaaatcttaacggacattggaaagatgtttcttcagaacattaccagctgcagtagaagagcccagcacggattgctcttcagccctctgcacggagcctctctccagtgaactgccgcagcagagaggcattcacttgtggtggctcagattcctgacaca

SEQ ID NO: 126 - protein, 265 aa, Homosapiens [sequence omitted]

SEQ ID NO: 127 - DNA, 3646 bp, Homosapiens
gggcgggtcttccggccctctcgaaaatcatttccggcatgagccggaagaccgtcccggatggcctcggggactgccagtgtgtggaggtgagctccgggattgccggcattcccgcttctgctggttgcttcatgctgcaggctgcggccgtcagccctcgctcgcattggtggcgctgaggtgccggggcagcaagtgacatgtcgtcgggcctccgcgccgctgacttcccccgctggaagcgccacatctcggagcaactgaggcgccgggaccggctgcagagacaggcgttcgaggagatcatcctgcagtataacaaattgctggaaaagtcagatcttcattcagtgttggcccagaaactacaggctgaaaagcatgacgtaccaaacaggcacgagataagtcccggacatgatggcacatggaatgacaatcagctacaagaaatggcccaactgaggattaagcaccaagaggaactgactgaattacacaagaaacgtggggagttagctcaactggtgattgacctgaataaccaaatgcagcggaaggacagggagatgcagatgaatgaagcaaaaattgcagaatgtttgcagactatctctgacctggagacggagtgcctagacctgcgcactaagctttgtgaccttgaaagagccaaccagaccctgaaggatgaatatgatgccctgcagatcacttttactgccttggagggaaaactgaggaaaactacggaagagaaccaggagctggtcaccagatggatggctgagaaagcccaggaagccaatcggcttaatgcagagaatgaaaaagactccaggaggcggcaagcccggctgcagaaagagcttgcagaagcagcaaaggaacctctaccagtcgaacaggatgatgacattgaggtcattgtggatgaaacttctgatcacacagaagagacctctcctgtgcgagccatcagcagagcagccacgagacgctctgtctcttccttcccagtcccccaggacaatgtggatactcatcctggttctggtaaagaagtgagggtaccagctactgccttgtgtgtcttcgatgcacatgatggggaagtcaacgctgtgcagttcagtccaggttcccggttactggccactggaggcatggaccgcagggttaagctttgggaagtatttggagaaaaatgtgagttcaagggttccctatctggcagtaatgcaggaattacaagcattgaatttgatagtgctggatcttacctcttagcagcttcaaatgattttgcaagccgaatctggactgtggatgattatcgattacggcacacactcacgggacacagtgggaaagtgctgtctgctaagttcctgctggacaatgcgcggattgtctcaggaagtcacgaccggactctcaaactctgggatctacgcagcaaagtctgcataaagacagtgtttgcaggatccagttgcaatgatattgtctgcacagagcaatgtgtaatgagtggacattttgacaagaaaattcgtttctgggacattcgatcagagagcatagttcgagagatggagctgttgggaaagattactgccctggacttaaacccagaaaggactgagctcctgagctgctcccgtgatgacttgctaaaagttattgatctccgaacaaatgctatcaagcagacattcagtgcacctgggttcaagtgcggctctgactggaccagagttgtcttcagccctgatggcagttacgtggcggcaggctctgctgagggctctctgtatatctggagtgtgctcacagggaaagtggaaaaggttctttcaaagcagcacagctcatccatcaatgcggtggcgtggtcgccctctggctcgcacgttgtcagtgtggacaaaggatgcaaagctgtgctgtgggcacagtactgacggggctctcagggctgggaggaccccagtgccctcctcagaagaagcacatgggctcctgcagccctgtcctggcaggtgatgtgctgggtatagcatggacctcccagagaagctcaagctatgtggcactgtagctttgccgtgaatgggatttctgaagatttgactgaggtctctcttggcctggaagaataacactgaaaaaacctgacgctgcggtcacttagcagaggctcaggttcttgccttgggaaacactactagctctgaccttccatacctcacttgggggagcacagggccccgctgggcctcctcaccaacggcagtgccaaaatcagcccccacatcaaggtggtgttctctgtgctttctctcgtccttccaaagtcggttctggcctaacgcatgtcccaacaccttgggttcatttgcccggtgaactcactttaagcattggattaacggaaactcccgaactacagacccctccctggtgggttgcatgaatgtgtctcattactgctgaaatgtcctcacatctctttcactgttcttcagagctttctggctctctttcccccacaaaattcgacatatttaaaaatctccgtgtggctttaaaaaatggttttttgtttttttgtttttttgaggtgggagaggatgtgtgaaaatcttttccagggaaatgggttcgctgcagaggtaaggatgtgttcctgtatcgatctgcagacacccagaaggtgggtgcacactgcatgcttgggggtgccaagggattcgagacctccaacatacttgtctgaaggtggtgattctggccatggcccctctgccaagcctgtgtgcgatgcccttggtgctttagtgcaagaagcctaggctcagaagcacagcagcgccatctttccgtttcaggggttgtgatgaaggccaaggaaaaacatttatctttactattttacctacgtataaagttttagttcattgggtgtgcgaaacaccctttttatcacttttaaatttgcactttattttttttcttccatgcttgttctctggacatttggggatgtgagtgttagagctggtgagagaggagtcaggtggccttcccaccgatggtcctggcctccacctgccctctcttccctgcctgatcaccgctttccaatttgcccttcagagaacttaagtcaaggagagttgaaattcacaggccagggcacatcttttatttatttcattatgttggccaacagaacttgattgtaaataataataaagaaatctgttatatacttttcaaactccatgcctcttggtgattattttattctcccttatccttagaaaggggaaagaaagtgatttctttgtttacctggtagttatttgtaaacaacggctagtactttttaacggtcttttttcattcatcatgtaagctccattccacaaagtatctctctctgtaaacaccagtgttccagtttcatgtcgcgcaaatcttaacggacattggaaagatgtttcttcagaacattaccagctgcagtagaagagcccagcacggattgctcttcagccctctgcacggagcctctctccagtgaactgccgcagcagagaggcattcacttgtggtggctcagattcctgacaca

SEQ ID NO: 128 - protein, 588 aa, Homosapiens; identical to SEQ ID NO: 122

SEQ ID NO: 129 - DNA, 2889 bp, Homosapiens
atttccggcatgagccggaagaccgtcccggatggcctcggggactgccagtgtgtggaggtgagctccgggattgccggcattcccgcttctgctggttgcttcatgctgcaggctgcggccgtcagccctcgctcgcattggtggcgctgaggtgccggggcagcaagtgacatgtcgtcgggcctccgcgccgctgacttcccccgctggaagcgccacatctcggagcaactgaggcgccgggaccggctgcagagacaggcgttcgaggagatcatcctgcagtataacaaattgctggaaaagtcagatcttcattcagtgttggcccagaaactacaggctgaaaagcatgacgtaccaaacaggcacgagataaggaggcggcaagcccggctgcagaaagagcttgcagaagcagcaaaggaacctctaccagtcgaacaggatgatgacattgaggtcattgtggatgaaacttctgatcacacagaagagacctctcctgtgcgagccatcagcagagcagccactaagcgactctcgcagcctgctggaggccttctggattctatcactaatatctttgggagacgctctgtctcttccttcccagtcccccaggacaatgtggatactcatcctggttctggtaaagaagtgagggtaccagctactgccttgtgtgtcttcgatgcacatgatggggaagtcaacgctgtgcagttcagtccaggttcccggttactggccactggaggcatggaccgcagggttaagctttgggaagtatttggagaaaaatgtgagttcaagggttccctatctggcagtaatgcaggaattacaagcattgaatttgatagtgctggatcttacctcttagcagcttcaaatgattttgcaagccgaatctggactgtggatgattatcgattacggcacacactcacgggacacagtgggaaagtgctgtctgctaagttcctgctggacaatgcgcggattgtctcaggaagtcacgaccggactctcaaactctgggatctacgcagcaaagtctgcataaagacagtgtttgcaggatccagttgcaatgatattgtctgcacagagcaatgtgtaatgagtggacattttgacaagaaaattcgtttctgggacattcgatcagagagcatagttcgagagatggagctgttgggaaagattactgccctggacttaaacccagaaaggactgagctcctgagctgctcccgtgatgacttgctaaaagttattgatctccgaacaaatgctatcaagcagacattcagtgcacctgggttcaagtgcggctctgactggaccagagttgtcttcagccctgatggcagttacgtggcggcaggctctgctgagggctctctgtatatctggagtgtgctcacagggaaagtggaaaaggttctttcaaagcagcacagctcatccatcaatgcggtggcgtggtcgccctctggctcgcacgttgtcagtgtggacaaaggatgcaaagctgtgctgtgggcacagtactgacggggctctcagggctgggaggaccccagtgccctcctcagaagaagcacatgggctcctgcagccctgtcctggcaggtgatgtgctgggtatagcatggacctcccagagaagctcaagctatgtggcactgtagctttgccgtgaatgggatttctgaagatttgactgaggtctctcttggcctggaagaataacactgaaaaaacctgacgctgcggtcacttagcagaggctcaggttcttgccttgggaaacactactagctctgaccttccatacctcacttgggggagcacagggccccgctgggcctcctcaccaacggcagtgccaaaatcagcccccacatcaaggtggtgttctctgtgctttctctcgtccttccaaagtcggttctggcctaacgcatgtcccaacaccttgggttcatttgcccggtgaactcactttaagcattggattaacggaaactcccgaactacagacccctccctggtgggttgcatgaatgtgtctcattactgctgaaatgtcctcacatctctttcactgttcttcagagctttctggctctctttcccccacaaaattcgacatatttaaaaatctccgtgtggctttaaaaaatggttttttgtttttttgtttttttgaggtgggagaggatgtgtgaaaatcttttccagggaaatgggttcgctgcagaggtaaggatgtgttcctgtatcgatctgcagacacccagaaggtgggtgcacactgcatgcttgggggtgccaagggattcgagacctccaacatacttgtctgaaggtggtgattctggccatggcccctctgccaagcctgtgtgcgatgcccttggtgctttagtgcaagaagcctaggctcagaagcacagcagcgccatctttccgtttcaggggttgtgatgaaggccaaggaaaaacatttatctttactattttacctacgtataaagttttagttcattgggtgtgcgaaacaccctttttatcacttttaaatttgcactttattttttttcttccatgcttgttctctggacatttggggatgtgagtgttagagctggtgagagaggagtcaggtggccttcccaccgatggtcctggcctccacctgccctctcttccctgcctgatcaccgctttccaatttgcccttcagagaacttaagtcaaggagagttgaaattcacaggccagggcacatcttttatttatttcattatgttggccaacagaacttgattgtaaataataataaagaaatctgttatatacttttcaaactcc

SEQ ID NO: 130 - protein, 463 aa, Homosapiens
MSSGLRAADFPRWKRHISEQLRRRDRLQRQAFEEIILQYNKLLEKSDLHSVLAQKLQAEKHDVPNRHEIRRRQARLQKELAEAAKEPLPVEQDDDIEVIVDETSDHTEETSPVRAISRAATKRLSQPAGGLLDSITNIFGRRSVSSFPVPQDNVDTHPGSGKEVRVPATALCVFDAHDGEVNAVQFSPGSRLLATGGMDRRVKLWEVFGEKCEFKGSLSGSNAGITSIEFDSAGSYLLAASNDFASRIWTVDDYRLRHTLTGHSGKVLSAKFLLDNARIVSGSHDRTLKLWDLRSKVCIKTVFAGSSCNDIVCTEQCVMSGHFDKKIRFWDIRSESIVREMELLGKITALDLNPERTELLSCSRDDLLKVIDLRTNAIKQTFSAPGFKCGSDWTRVVFSPDGSYVAAGSAEGSLYIWSVLTGKVEKVLSKQHSSSINAVAWSPSGSHVVSVDKGCKAVLWAQY

SEQ ID NO: 131 - DNA, 1789 bp, Homosapiens
ccggcatgagccggaagaccgtcccggatggcctcggggactgccagtgtgtggaggtgagctccgggattgccggcattcccgcttctgctggttgcttcatgctgcaggctgcggccgtcagccctcgctcgcattggtggcgctgaggtgccggggcagcaagtgacatgtcgtcgggcctccgcgccgctgacttcccccgctggaagcgccacatctcggagcaactgaggcgccgggaccggctgcagagacaggcgttcgaggagatcatcctgcagtataacaaattgctggaaaagtcagatcttcattcagtgttggcccagaaactacaggctgaaaagcatgacgtaccaaacaggcacgagataagtcccggacatgatggcacatggaatgacaatcagctacaagaaatggcccaactgaggattaagcaccaagaggaactgactgaattacacaagaaacgtggggagttagctcaactggtgattgacctgaataaccaaatgcagcggaaggacagggagatgcagaaagagcttgcagaagcagcaaaggaacctctaccagtcgaacaggatgatgacattgaggtcattgtggatgaaacttctgatcacacagaagagacctctcctgtgcgagccatcagcagagcagccactaagcgactctcgcagcctgctggaggccttctggattctatcactaatatctttgggagacgctctgtctcttccttcccagtcccccaggacaatgtggatactcatcctggttctggtaaagaagtgagggtaccagctactgccttgtgtgtcttcgatgcacatgatggggaagtcaacgctgtgcagttcagtccaggttcccggttactggccactggaggcatggaccgcagggttaagctttgggaagtatttggagaaaaatgtgagttcaagggttccctatctggcagtaatgcaggaattacaagcattgaatttgatagtgctggatcttacctcttagcagcttcaaatgattttgcaagccgaatctggactgtggatgattatcgattacgggtaagacccagttaagaaagttagtgcaatctccaaacttcatgtggtgttatcaaggcacaaactggcaggtgcttaattaggggactttgttttcccaaaaatcatgcttgattcaccctgcccttcctttcctccttggggaaatctgtgtttccactttatactctttgtccaaaactcagtttcaaaatatttgcaatgggaccctcacatttgcatgaaaaccttggaatactcttcataaggactaaatactttggtagatagcaattttggcttaatggcacagaacttagcaacagcatgtgaattgtgattcctgtgggctctaaaacctaattacctaaagtgggatatagaagtacaaatggatgtatcatagggataagacaattctgaaacaaaaactccaagctgagaaagaggggacaggtgtcagagcagggagaaatgattggatgttgaggaaagctgcatttgaaccaaaacttgccaagaattctcttggcatctgacagagagaccaaaacttggttgtatcatttttgattggggcagggggcggagggcgaagcatgtaacttaatttgcagacattttttttccccataagcctgaaggaatcatcacataagcttattaaatacaagctattgaaagatataatggaggatgaatttggcattagtaggcattttact

SEQ ID NO: 132 - protein, 309 aa, Homosapiens [sequence omitted]

SEQ ID NO: 133 - DNA, 2481 bp, Homosapiens
aagaccgtcccggatggcctcggggactgccagtgtgtggaggtgagctccgggattgccggcattcccgcttctgctggttgcttcatgctgcaggctgcggccgtcagccctcgctcgcattggtggcgctgaggtgccggggcagcaagtgacatgtcgtcgggcctccgcgccgctgacttcccccgctggaagcgccacatctcggagcaactgaggcgccgggaccggctgcagagacaggcgttcgaggagatcatcctgcagtataacaaattgctggaaaagtcagatcttcattcagtgttggcccagaaactacaggctgaaaagcatgacgtaccaaacaggcacgagataaggaggcggcaagcccggctgcagaaagagcttgcagaagcagcaaaggaacctctaccagtcgaacaggatgatgacattgaggtcattgtggatgaaacttctgatcacacagaagagacctctcctgtgcgagccatcagcagagcagccactaagcgactctcgcagcctgctggaggccttctggattctatcactaatatctttgggagacgctctgtctcttccttcccagtcccccaggacaatgtggatactcatcctggttctggtaaagaagtgagggtaccagctactgccttgtgtgtcttcgatgcacatgatggggaagtcaacgctgtgcagttcagtccaggaattacaagcattgaatttgatagtgctggatcttacctcttagcagcttcaaatgattttgcaagccgaatctggactgtggatgattatcgattacggcacacactcacgggacacagtgggaaagtgctgtctgctaagttcctgctggacaatgcgcggattgtctcaggaagtcacgaccggactctcaaactctgggatctacgcagcaaagtctgcataaagacagtgtttgcaggatccagttgcaatgatattgtctgcacagagcaatgtgtaatgagtggacattttgacaagaaaattcgtttctgggacattcgatcagagagcatagttcgagagatggagctgttgggaaagattactgccctggacttaaacccagaaaggactgagctcctgagctgctcccgtgatgacttgctaaaagttattgatctccgaacaaatgctatcaagcagacattcagtgcacctgggttcaagtgcggctctgactggaccagagttgtcttcagccctgatggcagttacgtggcggcaggctctgctgagggctctctgtatatctggagtgtgctcacagggaaagtggaaaaggttctttcaaagcagcacagctcatccatcaatgcggtggcgtggtcgccctctggctcgcacgttgtcagtgtggacaaaggatgcaaagctgtgctgtgggcacagtactgacggggctctcagggctgggaggaccccagtgccctcctcagaagaagcacatgggctcctgcagccctgtcctggcaggtgatgtgctgggtatagcatggacctcccagagaagctcaagctatgtggcactgtagctttgccgtgaatgggatttctgaagatttgactgaggtctctcttggcctggaagaataacactgaaaaaacctgacgctgcggtcacttagcagaggctcaggttcttgccttgggaaacactactagctctgaccttccatacctcacttgggggagcacagggccccgctgggcctcctcaccaacggcagtgccaaaatcagcccccacatcaaggtggtgttctctgtgctttctctcgtccttccaaagtcggttctggcctaacgcatgtcccaacaccttgggttcatttgcccggtgaactcactttaagcattggattaacggaaactcccgaactacagacccctccctggtgggttgcatgaatgtgtctcattactgctgaaatgtcctcacatctctttcactgttcttcagagctttctggctctctttcccccacaaaattcgacatatttaaaaatctccgtgtggctttaaaaaatggttttttgtttttttgtttttttgaggtgggagaggatgtgtgaaaatcttttccagggaaatgggttcgctgcagaggtaaggatgtgttcctgtatcgatctgcagacacccagaaggtgggtgcacactgcatgcttgggggtgccaagggattcgagacctccaacatacttgtctgaaggtggtgattctggccatggcccctctgccaagcctgtgtgcgatgcccttggtgctttagtgcaagaagcctaggctcagaagcacagcagcgccatctttccgtttcaggggttgtgatgaaggccaaggaaaaacatttatctttactatttatttcattatgttggccaacagaacttgattgtaaataataataaagaaatctgttatatacttttc

SEQ ID NO: 134 - protein, 428 aa, Homosapiens
MSSGLRAADFPRWKRHISEQLRRRDRLQRQAFEEIILQYNKLLEKSDLHSVLAQKLQAEKHDVPNRHEIRRRQARLQKELAEAAKEPLPVEQDDDIEVIVDETSDHTEETSPVRAISRAATKRLSQPAGGLLDSITNIFGRRSVSSFPVPQDNVDTHPGSGKEVRVPATALCVFDAHDGEVNAVQFSPGITSIEFDSAGSYLLAASNDFASRIWTVDDYRLRHTLTGHSGKVLSAKFLLDNARIVSGSHDRTLKLWDLRSKVCIKTVFAGSSCNDIVCTEQCVMSGHFDKKIRFWDIRSESIVREMELLGKITALDLNPERTELLSCSRDDLLKVIDLRTNAIKQTFSAPGFKCGSDWTRVVFSPDGSYVAAGSAEGSLYIWSVLTGKVEKVLSKQHSSSINAVAWSPSGSHVVSVDKGCKAVLWAQY

SEQ ID NO: 135 - DNA, 2353 bp, Homosapiens
taagcgactctcgcagcctgctggaggccttctggattctatcactaatatctttgggagacgctctgtctcttccttcccagtcccccaggacaatgtggatactcatcctggttctggtaaagaagtgagggtaccagctactgccttgtgtgtcttcgatgcacatgatggggaagtcaacgctgtgcagttcagtccaggttcccggttactggccactggaggcatggaccgcagggttaagctttgggaagtatttggagaaaaatgtgagttcaagggttccctatctggcagtaatgcaggaattacaagcattgaatttgatagtgctggatcttacctcttagcagcttcaaatgattttgcaagccgaatctggactgtggatgattatcgattacggcacacactcacgggacacagtgggaaagtgctgtctgctaagttcctgctggacaatgcgcggattgtctcaggaagtcacgaccggactctcaaactctgggatctacgcagcaaagtctgcataaagacagtgtttgcaggatccagttgcaatgatattgtctgcacagagcaatgtgtaatgagtggacattttgacaagaaaattcgtttctgggacattcgatcagagagcatagttcgagagatggagctgttgggaaagattactgccctggacttaaacccagaaaggactgagctcctgagctgctcccgtgatgacttgctaaaagttattgatctccgaacaaatgctatcaagcagacattcagtgcacctgggttcaagtgcggctctgactggaccagagttgtcttcagccctgatggcagttacgtggcggcaggctctgctgagggctctctgtatatctggagtgtgctcacagggaaagtggaaaaggttctttcaaagcagcacagctcatccatcaatgcggtggcgtggtcgccctctggctcgcacgttgtcagtgtggacaaaggatgcaaagctgtgctgtgggcacagtactgacggggctctcagggctgggaggaccccagtgccctcctcagaagaagcacatgggctcctgcagccctgtcctggcaggtgatgtgctgggtatagcatggacctcccagagaagctcaagctatgtggcactgtagctttgccgtgaatgggatttctgaagatttgactgaggtctctcttggcctggaagaataacactgaaaaaacctgacgctgcggtcacttagcagaggctcaggttcttgccttgggaaacactactagctctgaccttccatacctcacttgggggagcacagggccccgctgggcctcctcaccaacggcagtgccaaaatcagcccccacatcaaggtggtgttctctgtgctttctctcgtccttccaaagtcggttctggcctaacgcatgtcccaacaccttgggttcatttgcccggtgaactcactttaagcattggattaacggaaactcccgaactacagacccctccctggtgggttgcatgaatgtgtctcattactgctgaaatgtcctcacatctctttcactgttcttcagagctttctggctctctttcccccacaaaattcgacatatttaaaaatctccgtgtggctttaaaaaatggttttttgtttttttgtttttttgaggtgggagaggatgtgtgaaaatcttttccagggaaatgggttcgctgcagaggtaaggatgtgttcctgtatcgatctgcagacacccagaaggtgggtgcacactgcatgcttgggggtgccaagggattcgagacctccaacatacttgtctgaaggtggtgattctggccatggcccctctgccaagcctgtgtgcgatgcccttggtgctttagtgcaagaagcctaggctcagaagcacagcagcgccatctttccgtttcaggggttgtgatgaaggccaaggaaaaacatttatctttactattttacctacgtataaagttttagttcattgggtgtgcgaaacaccctttttatcacttttaaatttgcactttattttttttcttccatgcttgttctctggacatttggggatgtgagtgttagagctggtgagagaggagtcaggtggccttcccaccgatggtcctggcctccacctgccctctcttccctgcctgatcaccgctttccaatttgcccttcagagaacttaagtcaaggagagttgaaattcacaggccagggcacatcttttatttatttcattatgttggccaacagaacttgattgtaaataataataaagaaatctgttatatacttttcaaactcc

SEQ ID NO: 136 - protein, 266 aa, Homosapiens; identical to SEQ ID NO: 18

SEQ ID NO: 137 - DNA, 597 bp, Homosapiens
catgtggctggctgtgggaagactgttccaggagaggaaatagcaagtggaaaggcctagacggaggtttaaagaaaagcaggccagtggtggtggctcacgtctgtaaccccaacactttagaaggttgaggtgagaggatcaggtggtgagaaataaagtcagaggtaaaggggggccagagcatgccggacctggcaagcattgtccagacttaaatgggaagccattggaatgtttgggtggatgctgataccccaaacgtcagaacaggctttctgcatatacttgtttcattcccaagtcagtcccccatgtaagtgtgttagtggtcgcagagtcccctccatccattccctgagtgttcttgggagcaggcattgttctgggcactgtgaagacaaaagtgaaggaaacaaaatggcctaggccctgccctcatggagcctggactccagtgagggaagagagactgtagaataattcccaagcaagagtgaaatgtggccaggcacggtagctcatgcctataatcccagcacttcaggaggccaggagtttgacaccaacctggccaacatgacgaaaccccatctc

SEQ ID NO: 138 - protein, 64 aa, Homosapiens
MFGWMLIPQTSEQAFCIYLFHSQVSPPCKCVSGRRVPSIHSLSVLGSRHCSGHCEDKSEGNKMA

SEQ ID NO: 139 - DNA, 2682 bp, Homosapiens
gagacctggatgctgggcatcctcgctagatcccctacaaattccccacatacgtaggccaggagcctcagcggtgccccttcaggctcatctggcaagacggtaccagcttgctcagaacaggggctggctattcatcatctcagagcatagagaccctctccttgccacccggcccttcccacctggttggtgacaaatcacaaggtggtagaagttgccagggacagataacatggcagccagcgggaagaccagcaagtccgaaccgaaccatgttatcttcaagaagatctcccgggacaaatcggtgaccatctacctggggaacagagactacatagaccatgtcagccaagtccagcctgtggatggtgtcgtgttggttgatcctgatcttgtgaagggaaagaaagtttcctgactacttgccctgttcagtgatgttgcagccagctccacaagattcagggaagtcctgtggggttgactttgaggtcaaagcattcgccacagacagcaccgatgccgaagaggacaaaatccccaagaagtaagagtatggttgcggaataggtgaggggtctgcggtgggggtggagagaagagacgacctccaccttgtctctgtgggacagacctcttcccatagggctggcacggctggggtaccatctgcatgtgggatggaggtcaaaggttgatcatttttggggaaaaaaaagaaaacaagaaaatgacagggaagttagcaacctccagggctcacgtaagccccgaaaagctcccgggtttcccctttgttgaagttttgttgttgttgtttgtttgtttgtttgtttgttttttgtggtaaaatgtacacaacatgaagtttgccattttaaccacttttttttctttttttcttttattttttgaaatggagcctcgctctgtcccccaggctggagtgcaatgtgacctcggctcactgcaacctccgcctcccaggttcaagcgattctcctgcctcaatctcccgagtagctgggattacaggcgtgcgccaccacgcctggctaatttttttttttttgtatttttagtagagatgggtttcaccatgttggccaggctggtcttgaactcctgacctcaagtgatccgcccgccttggcctcccaaagtgctgggattacaggcgtgagccactgtgcccggcccattttaaccacttttaaatgtaccattcagtggcttaagtacattccgaatgttgtgtagccttcaccgctgtctatacccaaaactttcccattgcctgagcaggaactctacaaccattgagcctaccgctccatccttcccattctcccaccccctgtgctgttttttttttacctaaacaagatttccgcctggcccttcgcactgtctccttgtgccccatgtacacatctctggaggcgcaggatagtgagctgcagtaatggagctcgcatgtatatggcagctattccatgaggcccttgacgccctcacaccttagccttgctgacaggaggcagagctgggaatccacggagcctaaggggctaagcttggccctcgggatgttgcctggccccacagcttcccccacagggaagggaccaggacccagacccccaggctcttccaccgtcagggctgcctcaggctctgaccagtgtcgttgccctcttcccgtccaccctgtctccatggggagcattcctggagaatctccatgtgacagtggggagagaacagaagcctccctaaagcggcctgggtgccaatccctggcttgtctgtggctgtttcccacaggagctccgtgcgattactgatccgcaaagtacagcatgccccacttgagatgggtccccagccccgagctgaggcggcctggcagttcttcatgtctgacaagcccctgcaccttgcggtctctctcaacaaagagatctatttccatggggagcccatccctgtgaccgtgactgtcaccaataacacagagaagaccgtgaagaagattaaagcattcgtggaacaggtggccaatgtggttctctactcgagtgattattacgtcaagcccgtggctatggaggaagcgcaagaaaaagtgccaccaaacagcactttgaccaagacgctgacgctgctgcccttgctggctaacaatcgagaaaggagaggcattgccctggatgggaaaatcaagcacgaggacacaaaccttgcctccagcaccatcattaaggagggcatagaccggaccgtcctgggaatcctggtgtcttaccagatcaaggtgaagctcacagtgtcaggctttctgggagagctcacctccagtgaagtcgccactgaggtcccattccgcctcatgcaccctcagcctgaggacccagctaaggaaagttatcaggatgcaaatttagtttttgaggagtttgctcgccataatctgaaagatgcaggagaagctgaggaggggaagagagacaagaatgacgttgatgagtgaagatgtcggctcaggatgccggaaaatgacctgtagttaccagtgcaacgagcaaagccccacagtttagtcctttggagttatgctgcgtatgaaaggatgagtcttcttccgagaaataaagcttgtttgttctcccctgg

SEQ ID NO: 140 - protein, 218 aa, Homosapiens
MGPQPRAEAAWQFFMSDKPLHLAVSLNKEIYFHGEPIPVTVTVTNNTEKTVKKIKAFVEQVANVVLYSSDYYVKPVAMEEAQEKVPPNSTLTKTLTLLPLLANNRERRGIALDGKIKHEDTNLASSTIIKEGIDRTVLGILVSYQIKVKLTVSGFLGELTSSEVATEVPFRLMHPQPEDPAKESYQDANLVFEEFARHNLKDAGEAEEGKRDKNDVDE

SEQ ID NO: 141 - DNA, 6660 bp, Homosapiens
gagacctggatgctgggcatcctcgctagatcccctacaaattccccacatacgtaggccaggagcctcagcggtgccccttcaggctcatctggcaagacggtaccagcttgctcagaacaggggctggctattcatcatctcagagcatagagaccctctccttgccacccggcccttcccacctggttggtgacaaatcacaaggtggtagaagttgccagggacagataacatggcagccagcgggaagaccagcaagtccgaaccgaaccatgttatcttcaagaagatctcccgggacaaatcggtgaccatctacctggggaacagagactacatagaccatgtcagccaagtccagcctgtggatggtgtcgtgttggttgatcctgatcttgtgaagggaaagaaagtttcctgactacttgccctgttcagtgatgttgcagccagctccacaagattcagggaagtcctgtggggttgactttgaggtcaaagcattcgccacagacagcaccgatgccgaagaggacaaaatccccaagaagtaagagtatggttgcggaataggtgaggggtctgcggtgggggtggagagaagagacgacctccaccttgtctctgtgggacagacctcttcccatagggctggcacggctggggtaccatctgcatgtgggatggaggtcaaaggttgatcatttttggggaaaaaaaagaaaacaagaaaatgacagggaagttagcaacctccagggctcacgtaagccccgaaaagctcccgggtttcccctttgttgaagttttgttgttgttgtttgtttgtttgtttgtttgttttttgtggtaaaatgtacacaacatgaagtttgccattttaaccacttttttttctttttttcttttattttttgaaatggagcctcgctctgtcccccaggctggagtgcaatgtgacctcggctcactgcaacctccgcctcccaggttcaagcgattctcctgcctcaatctcccgagtagctgggattacaggcgtgcgccaccacgcctggctaatttttttttttttgtatttttagtagagatgggtttcaccatgttggccaggctggtcttgaactcctgacctcaagtgatccgcccgccttggcctcccaaagtgctgggattacaggcgtgagccactgtgcccggcccattttaaccacttttaaatgtaccattcagtggcttaagtacattccgaatgttgtgtagccttcaccgctgtctatacccaaaactttcccattgcctgagcaggaactctacaaccattgagcctaccgctccatccttcccattctcccaccccctgtgctgttttttttttacctaaacaagatttccgcctggcccttcgcactgtctccttgtgccccatgtacacatctctggaggcgcaggatagtgagctgcagtaatggagctcgcatgtatatggcagctattccatgaggcccttgacgccctcacaccttagccttgctgacaggaggcagagctgggaatccacggagcctaaggggctaagcttggccctcgggatgttgcctggccccacagcttcccccacagggaagggaccaggacccagacccccaggctcttccaccgtcagggctgcctcaggctctgaccagtgtcgttgccctcttcccgtccaccctgtctccatggggagcattcctggagaatctccatgtgacagtggggagagaacagaagcctccctaaagcggcctgggtgccaatccctggcttgtctgtggctgtttcccacaggagctccgtgcgattactgatccgcaaagtacagcatgccccacttgagatgggtccccagccccgagctgaggcggcctggcagttcttcatgtctgacaagcccctgcaccttgcggtctctctcaacaaagaggtaaccacctaccatcgctactacccgcagggcagcaggcctaggggcaggccccacacccctctcttcaccagccccagcccttaactacatgggtgccttgcaaggaagcttgtttctaggataaagcaccaacatgcgtaagtgactggcctgttttcacagcctggagctggtcagcatggtccttagaggaggacggaactggcttgcgttccacccactggctgtcccgagggactggggaaggaaggggcgctgcttttcacatacctgccccccagctgtccttgtcctgtccacctccatgggccttgttcactcatggagcatcaatagctgtggtatcccaaattcttcacttcctgggaaatttaagttttgcagaaaccatgtgggatggcagtgtcacctgtgatgtcatctcttaggggtgtcatggtgggaaaaggtgagagctgctggccaaggctggctctggttcctctggtcagcagtcagccatttgtgcactgtgtgtatacacgtgtgtgggtgtgccaggggctgtgttacacgggctctgctgggtgggatgccagcacttggctttcccagtggtttcctttcacttcactcatcctgcccccataacctcctgacccctggcctcctccgatgtgatgatcggaactctgttcccctccccagcttcccacagatgggtggaatgtgtttcaggcccttccttagaagaaatgtattgctatcacttcatcttccttaaattctgccgcttttattccagtgaaagggattgagatgaatctagaaagcagtaagattaaagacaccgccacatctgttctcttcttctgacctatctgctgacttttctagatctatttccatggggagcccatccctgtgaccgtgactgtcaccaataacacagagaagaccgtgaagaagattaaagcattcgtggaacaggtggccaatgtggttctctactcgagtgattattacgtcaagcccgtggctatggaggaagcgcagtgagtagctgttggggtttccgtttcctgggcgtctcagccttctgtgtcaagtttctcgccgtttattgctgaagaaggaactagaatgttcagctagctcgccagccttccacttccttcctctttctcccttcgagggctgcacagaaagttagcatcttagctctgcatctaccacacccctctgtgcccatcttacaggagttctgaggattaatgcaagccaaagaatgacgcagaggagagaaataaagacagaaatgtcaccatgggatcagctggctttttctatttatccttggaatgaattgttaggaatttggtactatttccacctcccagaagatggtcaaatgaactgtcagcccaggctaggattccctatcttttgatctcaaattgaaatcttataccagtgacaactggattagaatatatctgttcttagcctgttgttgtgaatgacttttcccctttgttagaatcaaaaacaaatgagaatcctgccatggttcctttatgctggcctgagagacctgcccagctttgctgtgtgccacaaagtcaaatagattcatttaatacatggcttggagtggggggcgatgatctcccacctccagccccccgagaggatagctcgaccaggtcttaactctttgccttgctggcatgttctaagcaccgttgtatgtaaaaaatattatcagggttagaggaaggttagggtaggggaatgatgaaagacaactgattccttaagataatataaggtaatagatagatttttttgagatggagtctcactctgttgcccaggctggagtgcagtggtgagatctcagctcactgcaacctccaccacccaggttcgagccattctcctgactcagtctcccaagtagctggaattacaggagcccgccaccaagcccagctaattttgtatttttttttttttttgagacggagttttgctcttgttgcccaagcaggagtgcaatggcgcgatcttgactcactgcaacctttgcctcctgggttcaagtgattctcctgcctcagcctcctgagtagctgggattacaggcacacgccaccacccctggctaattttttgtatttttattagaaatggggtttcaccatgttagccaggctggtctcgaactcctgacctcaggtgatctgcccacctcggcctcccaaagtgctgggattacaggagtgagccaccgtgcctggctgattttgtatttttagtagagacagggtttcacctgttggccaggctggtctcaaactcctgacctcaggtgatctgcttgcctcagcctcccaaagtgctgaaattacaggcgtgagccaccgcacctggcctatatgggaatatttaaaaggcaactttaggagaaactattactgttattcaaaacagattcaaactgtaggtctacaagggagggagacaggaaagaaccaccactcactgcctcctttctgccaagattgggctctgttctgcctttaggggatcctcgcacatccctgtgccctggaggggtcttggccctggttcacctttcctcatgtgctcagcaacatgggagcaaaggatcctggctgagttttcccctaatatgtattccatcacctggtcctctttcaaagtgttgggtgcattttgggtcaaagattcccaggaaactggaaagcattccaaagtcccccaaaggctggaggagcctgggagctggactggaccatgctgacaagtctgaagctagaggccactcagaaagctgcagagcaggagccatcgtcccagagccctgtggcttctggggctttagtgggcaggcttccacggaaccaggacagacctgactcccaagctgctccccaccatccaaacccacatcctgaagctctggggagtggccccagagccttggcatagtcctttggcaagctctgcacaaacacaaaaagtccatcctctgagcccaaccccaagggccctcttcctattccagccatctttacaatgctgtttctgcttttttcaatgctcaaattacgctcattaagagaggttccaccaggacccagatggtaggatgtgggccaccttgggctctggcagatttctgtaaagagcttcctgtagacactggaggcaggataggggacagctgcttttacctatccagggaaacttgattagggaaaggaagtcctttcccagagaggcagttcagacttccagctgtctcaggacagccttagaatggtcctgatgctggccacaccccaccttgttctggctaggcacaggatggagggtgtgcttccggcacgaatgggctctgctgtcagagagtgtgcagccacgtgactgtgggcacacttcccgtctggaaaatggggatcttggagcacctgcttggtatggggttgatgagggtaaggtgagagttttgaggacaggccttagcacttggcctggcacacagcatgcacgtgagtggaggagccaactctccagccgcagaggctgcttcatgatcctggccatgctgccgtgtgtctgcctggagaaacacacattgctgtgtccccagctggatcccagacccgcctgttggcacagggtctccgccatctgtcagatgttgagaaatctataccccgactgatgatgaagaagatccagtagagaaagagcatgtgctgctttggacccaagctattcggtctgtgtgatccacaaattgtgggtccctgcgttgcccctctagacaacttaccacacagtcacactgtgacccccttatagtgacagtttttggtgacaagaggctttctggcctggactcgttgctgacaccaaccagaaggttctgcaggccaccgtgtggttcacaaagtctcaggaggaggctgtggtctctgactcttgagccagtttgtctcattaactccatagaacattctagaaattcagcaattcagaataggctgagttgcttgaagaaatatcctcctgttgctgccagcccaccctgagatttcacaagcactgttctgcttctcagaaaaagtgccaccaaacagcactttgaccaagacgctgacgctgctgcccttgctggctaacaatcgagaaaggagaggcattgccctggatgggaaaatcaagcacgaggacacaaaccttgcctccagcaccatcattaaggagggcatagaccggaccgtcctgggaatcctggtgtcttaccagatcaaggtgaagctcacagtgtcaggctttctgggagagctcacctccagtgaagtcgccactgaggtcccattccgcctcatgcaccctcagcctgaggacccagctaaggaaagttatcaggatgcaaatttagtttttgaggagtttgctcgccataatctgaaagatgcaggagaagctgaggaggggaagagagacaagaatgacgttgatgagtgaagatgtcggctcaggatgccggaaaatgacctgtagttaccagtgcaacgagcaaagccccacagtttagtcctttggagttatgctgcgtatgaaaggatgagtcttcttccgagaaataaagcttgtttgttctcccctgg

SEQ ID NO: 142 - protein, 62 aa, Homosapiens
MAASGKTSKSEPNHVIFKKISRDKSVTIYLGNRDYIDHVSQVQPVDGVVLVDPDLVKGKKVS

SEQ ID NO: 143 - DNA, 3456 bp, Homosapiens
gagacctggatgctgggcatcctcgctagatcccctacaaattccccacatacgtaggccaggagcctcagcggtgccccttcaggctcatctggcaagacggtaccagcttgctcagaacaggggctggctattcatcatctcagagcatagagaccctctccttgccacccggcccttcccacctggttggtgacaaatcacaaggtggtagaagttgccagggacagataacatggcagccagcgggaagaccagcaagtccgaaccgaaccatgttatcttcaagaagatctcccgggacaaatcggtgaccatctacctggggaacagagactacatagaccatgtcagccaagtccagcctgtggatggtgtcgtgttggttgatcctgatcttgtgaagggaaagaaagtgtatgtcactctgacctgcgccttccgctatggccaagaggacattgacgtgatcggcttgaccttccgcagggacctgtacttctcccgggtccaggtgtatcctcctgtgggggccgcgagcacccccacaaaactgcaagagagcctgcttaaaaagctggggagcaacacgtacccctttctcctgacgtttcctgactacttgccctgttcagtgatgttgcagccagctccacaagattcagggaagtcctgtggggttgactttgaggtcaaagcattcgccacagacagcaccgatgccgaagaggacaaaatccccaagaagtaagagtatggttgcggaataggtgaggggtctgcggtgggggtggagagaagagacgacctccaccttgtctctgtgggacagacctcttcccatagggctggcacggctggggtaccatctgcatgtgggatggaggtcaaaggttgatcatttttggggaaaaaaaagaaaacaagaaaatgacagggaagttagcaacctccagggctcacgtaagccccgaaaagctcccgggtttcccctttgttgaagttttgttgttgttgtttgtttgtttgtttgtttgttttttgtggtaaaatgtacacaacatgaagtttgccattttaaccacttttttttctttttttcttttattttttgaaatggagcctcgctctgtcccccaggctggagtgcaatgtgacctcggctcactgcaacctccgcctcccaggttcaagcgattctcctgcctcaatctcccgagtagctgggattacaggcgtgcgccaccacgcctggctaatttttttttttttgtatttttagtagagatgggtttcaccatgttggccaggctggtcttgaactcctgacctcaagtgatccgcccgccttggcctcccaaagtgctgggattacaggcgtgagccactgtgcccggcccattttaaccacttttaaatgtaccattcagtggcttaagtacattccgaatgttgtgtagccttcaccgctgtctatacccaaaactttcccattgcctgagcaggaactctacaaccattgagcctaccgctccatccttcccattctcccaccccctgtgctgttttttttttacctaaacaagatttccgcctggcccttcgcactgtctccttgtgccccatgtacacatctctggaggcgcaggatagtgagctgcagtaatggagctcgcatgtatatggcagctattccatgaggcccttgacgccctcacaccttagccttgctgacaggaggcagagctgggaatccacggagcctaaggggctaagcttggccctcgggatgttgcctggccccacagcttcccccacagggaagggaccaggacccagacccccaggctcttccaccgtcagggctgcctcaggctctgaccagtgtcgttgccctcttcccgtccaccctgtctccatggggagcattcctggagaatctccatgtgacagtggggagagaacagaagcctccctaaagcggcctgggtgccaatccctggcttgtctgtggctgtttcccacaggagctccgtgcgattactgatccgcaaagtacagcatgccccacttgagatgggtccccagccccgagctgaggcggcctggcagttcttcatgtctgacaagcccctgcaccttgcggtctctctcaacaaagagatctatttccatggggagcccatccctgtgaccgtgactgtcaccaataacacagagaagaccgtgaagaagattaaagcattcgtggaacaggtggccaatgtggttctctactcgagtgattattacgtcaagcccgtggctatggaggaagcgcacatgcacgtgagtggaggagccaactctccagccgcagaggctgcttcatgatcctggccatgctgccgtgtgtctgcctggagaaacacacattgctgtgtccccagctggatcccagacccgcctgttggcacagggtctccgccatctgtcagatgttgagaaatctataccccgactgatgatgaagaagatccagtagagaaagagcatgtgctgctttggacccaagctattcggtctgtgtgatccacaaattgtgggtccctgcgttgcccctctagacaacttaccacacagtcacactgtgacccccttatagtgacagtttttggtgacaagaggctttctggcctggactcgttgctgacaccaaccagaaggttctgcaggccaccgtgtggttcacaaagtctcaggaggaggctgtggtctctgactcttgagccagtttgtctcattaactccatagaacattctagaaattcagcaattcagaataggctgagttgcttgaagaaatatcctcctgttgctgccagcccaccctgagatttcacaagcactgttctgcttctcagaaaaagtgccaccaaacagcactttgaccaagacgctgacgctgctgcccttgctggctaacaatcgagaaaggagaggcattgccctggatgggaaaatcaagcacgaggacacaaaccttgcctccagcaccatcattaaggagggcatagaccggaccgtcctgggaatcctggtgtcttaccagatcaaggtgaagctcacagtgtcaggctttctgggagagctcacctccagtgaagtcgccactgaggtcccattccgcctcatgcaccctcagcctgaggacccagctaaggaaagttatcaggatgcaaatttagtttttgaggagtttgctcgccataatctgaaagatgcaggagaagctgaggaggggaagagagacaagaatgacgttgatgagtgaagatgtcggctcaggatgccggaaaatgacctgtagttaccagtgcaacgagcaaagccccacagtttagtcctttggagttatgctgcgtatgaaaggatgagtcttcttccgagaaataaagcttgtttgttctcccctgg

SEQ ID NO: 144 - protein, 171 aa, Homosapiens
MAASGKTSKSEPNHVIFKKISRDKSVTIYLGNRDYIDHVSQVQPVDGVVLVDPDLVKGKKVYVTLTCAFRYGQEDIDVIGLTFRRDLYFSRVQVYPPVGAASTPTKLQESLLKKLGSNTYPFLLTFPDYLPCSVMLQPAPQDSGKSCGVDFEVKAFATDSTDAEEDKIPKK

SEQ ID NO: 145 - DNA, 1586 bp, Homosapiens
gagacctggatgctgggcatcctcgctagatcccctacaaattccccacatacgtaggccaggagcctcagcggtgccccttcaggctcatctggcaagacggtaccagcttgctcagaacaggggctggctattcatcatctcagagcatagagaccctctccttgccacccggcccttcccacctggttggtgacaaatcacaaggtggtagaagttgccagggacagataacatggcagccagcgggaagaccagcaagtccgaaccgaaccatgttatcttcaagaagatctcccgggacaaatcggtgaccatctacctggggaacagagactacatagaccatgtcagccaagtccagcctgtggatggtgtcgtgttggttgatcctgatcttgtgaagggaaagaaagtgtatgtcactctgacctgcgccttccgctatggccaagaggacattgacgtgatcggcttgaccttccgcagggacctgtacttctcccgggtccaggtgtatcctcctgtgggggccgcgagcacccccacaaaactgcaagagagcctgcttaaaaagctggggagcaacacgtacccctttctcctgacgtttcctgactacttgccctgttcagtgatgttgcagccagctccacaagattcagggaagtcctgtggggttgactttgaggtcaaagcattcgccacagacagcaccgatgccgaagaggacaaaatccccaagaagagctccgtgcgattactgatccgcaaagtacagcatgccccacttgagatgggtccccagccccgagctgaggcggcctggcagttcttcatgtctgacaagcccctgcaccttgcggtctctctcaacaaagagatctatttccatggggagcccatccctgtgaccgtgactgtcaccaataacacagagaagaccgtgaagaagattaaagcattcgtggaacaggtggccaatgtggttctctactcgagtgattattacgtcaagcccgtggctatggaggaagcgcaagaaaaagtgccaccaaacagcactttgaccaagacgctgacgctgctgcccttgctggctaacaatcgagaaaggagaggcattgccctggatgggaaaatcaagcacgaggacacaaaccttgcctccagcaccatcattaaggagggcatagaccggaccgtcctgggaatcctggtgtcttaccagatcaaggtgaagctcacagtgtcaggctttctgggagagctcacctccagtgaagtcgccactgaggtcccattccgcctcatgcaccctcagcctgaggacccagttatcaggatgcaaatttagtttttgaggagtttgctcgccataatctgaaagatgcaggagaagctgaggaggggaagagagacaagaatgacgttgatgagtgaagatgtcggctcaggatgccggaaaatgacctgtagttaccagtgcaacgagcaaagccccacagtttagtcctttggagttatgctgcgtatgaaaggatgagtcttcttccgagaaataaagcttgtttgttctcccctgg

SEQ ID NO: 146 - protein, 373 aa, Homosapiens
MAASGKTSKSEPNHVIFKKISRDKSVTIYLGNRDYIDHVSQVQPVDGVVLVDPDLVKGKKVYVTLTCAFRYGQEDIDVIGLTFRRDLYFSRVQVYPPVGAASTPTKLQESLLKKLGSNTYPFLLTFPDYLPCSVMLQPAPQDSGKSCGVDFEVKAFATDSTDAEEDKIPKKSSVRLLIRKVQHAPLEMGPQPRAEAAWQFFMSDKPLHLAVSLNKEIYFHGEPIPVTVTVTNNTEKTVKKIKAFVEQVANVVLYSSDYYVKPVAMEEAQEKVPPNSTLTKTLTLLPLLANNRERRGIALDGKIKHEDTNLASSTIIKEGIDRTVLGILVSYQIKVKLTVSGFLGELTSSEVATEVPFRLMHPQPEDPVIRMQI

SEQ ID NO: 147 - DNA, 620 bp, Homosapiens
ctggatgctgggcatcctcgctagatcccctacaaattccccacatacgtaggccaggagcctcagcggtgccccttcaggctcatctggcaagacggtaccagcttgctcagaacaggggctggctattcatcatctcagagcatagagaccctctccttgccacccggcccttcccacctggttggtgacaaatcacaaggtggtagaagttgccagggacagataacatggcagccagcgggaagaccagcaagtccgaaccgaaccatgttatcttcaagaagatctcccgggacaaatcggtgaccatctacctggggaacagagactacatagaccatgtcagccaagtccagcctgtggatggtgtcgtgttggttgatcctgatcttgtgaagggaaagaaaggtgagatgaagccccttgtctcaggctggtttctgggcggagtggactgctctctgggcggctctgggaaggggcatttacatggaaggagagacaggaaggcagaggcagcgctcttgcacatggaaccagtgccaggcccactgacccacactcctgtacctaattcacgtgacataggtcctgttgacaccagagctcactcgctc

SEQ ID NO: 148 - protein, 129 aa, Homosapiens
MAASGKTSKSEPNHVIFKKISRDKSVTIYLGNRDYIDHVSQVQPVDGVVLVDPDLVKGKKGEMKPLVSGWFLGGVDCSLGGSGKGHLHGRRDRKAEAALLHMEPVPGPLTHTPVPNSRDIGPVDTRAHS

SEQ ID NO: 149 - DNA, 440 bp, Homosapiens
gctagatcccctacaaattccccacatacgtaggccaggagcctcagcggtgccccttcaggctcatctggcaagacggtaccagcttgctcagaacaggggctggctattcatcatctcagcctgcttaaaaagctggggagcaacacgtacccctttctcctgacgtttcctgactacttgccctgttcagtgatgttgcagccagctccacaagattcagggaagtcctgtggggttgactttgaggtcaaagcattcgccacagacagcaccgatgccgaagaggacaaaatccccaagaagtaagagtatggttgcggaataggtgaggggtctgcggtgggggtggagagaagagacgacctccaccttgtctctgtgggacagacctcttcccatagggctggcacggctggggtaccatctgcatgtgggat

SEQ ID NO: 150 - protein, 37 aa, Homosapiens
MLQPAPQDSGKSCGVDFEVKAFATDSTDAEEDKIPKK

SEQ ID NO: 151 - DNA, 5083 bp, Homosapiens
gtgctgggattacaggcgtgagccactgtgcccggcccattttaaccacttttaaatgtaccattcagtggcttaagtacattccgaatgttgtgtagccttcaccgctgtctatacccaaaactttcccattgcctgagcaggaactctacaaccattgagcctaccgctccatccttcccattctcccaccccctgtgctgttttttttttacctaaacaagatttccgcctggcccttcgcactgtctccttgtgccccatgtacacatctctggaggcgcaggatagtgagctgcagtaatggagctcgcatgtatatggcagctattccatgaggcccttgacgccctcacaccttagccttgctgacaggaggcagagctgggaatccacggagcctaaggggctaagcttggccctcgggatgttgcctggccccacagcttcccccacagggaagggaccaggacccagacccccaggctcttccaccgtcagggctgcctcaggctctgaccagtgtcgttgccctcttcccgtccaccctgtctccatggggagcattcctggagaatctccatgtgacagtggggagagaacagaagcctccctaaagcggcctgggtgccaatccctggcttgtctgtggctgtttcccacaggagctccgtgcgattactgatccgcaaagtacagcatgccccacttgagatgggtccccagccccgagctgaggcggcctggcagttcttcatgtctgacaagcccctgcaccttgcggtctctctcaacaaagagatctatttccatggggagcccatccctgtgaccgtgactgtcaccaataacacagagaagaccgtgaagaagattaaagcattcgtggaacaggtggccaatgtggttctctactcgagtgattattacgtcaagcccgtggctatggaggaagcgcaagaaaaagtgccaccaaacagcactttgaccaagacgctgacgctgctgcccttgctggctaacaatcgagaaaggagaggcattgccctggatgggaaaatcaagcacgaggacacaaaccttgcctccagcaccatcattaaggagggcatagaccggaccgtcctgggaatcctggtgtcttaccagatcaaggtgaagctcacagtgtcaggctttctgggagagctcacctccagtgaagtcgccactgaggtcccattccgcctcatgcaccctcagcctgaggacccaggtcagttatgtccttttttagctttctttaattatttgctacttgcagatttattgttgatgtatttctagtctttcttgaccgcatctcagagcatgggagtggccaggtgtaagagattccatgtgatctacaaggtgaatagtctggggggaagggagggcccatctgttcagcgctgagccgggtagattatccaccttcagctggagtctgcaagatgtagcatccttgctcttggacagggacaatctcgtgaggttttatcatgaatgatttaagagcagaagctctgctgtcaacagacctggatttagaattaaagatgatttaggtaaaaacttaattttagagcacgaggattttgcatttcatttggaaacaaaaggcctcatgtttcatttgaaagcattaacagacatttaaaagaagataatttttttttttttttgagacggagtctcactctgtcacccagtctggagtgcagtggtgtgatcaagcttactacagcctcaacctcctgggctcaacccaccctcctacctcagcttctgaagtagctggaactacaggcataccaccacccttagctaatgtttttgatttttagtagagatgaggtcttgccatgttgctcaggctagtcttgaactcctgagctcaagtgatctttctgcctcatcctcccaaagtgctggggttacaggcatgagccactgcacctggctgaagataactgtttttttttggggttttttttttttttttttttttctgagatggagtctctgtcacccagctggagtgcagtggcacaacctcggctcactgcaacctctgcctcccgggttcaagtgattctcgtgcctcagcctcctgaatagctgggattacaggcgcctgccaccccacctggctaatttttgtatttgtagtagagacggggtttcgccatgtcggccaggctagttttgaactcctgacctcaggtgatccacccgcctcagcgtcccaaagtgctgggattacaggcgtgagtcacggcgcccggcctgaagataactatttttgacagtggcagttatggtaagaatacagaaaatactagaaaagagggtcaggctgggttcctgacacctcagctcatttgaattataaatctactggctcttgtatggatgcgaaatgatgcaatagttgtatgactctgaaaacatataaaaaccactagactgtcgactgtgaaaaggtaaattgtatgatatatgaatttgatctcaatcattctctttctaaaaaggtaaatgaagcagcaaaaataatataggtgaaatctcagaaattctgaagaaacattctctgcatcgaggcagcttagttgacgggaaagaaaaacagatctgtctaaatgagaactctccgtaggtataggaataagggatattttaagtaaaagtggtataaacaagcagggtttatttttctcatactttacaaatagcttttctatattggtagtgaaatgccgtttaaacattagaatgagcccccactattcattttaggttttgtctcaacagtactttgtttcaaaatagctcttccaaatactttggattcagatcctcaatgaacttttccaaaactgtcccttggagaaaaatgtagtccagctatatgttttcagttcatttatgcttgtgtcattaaaatgttactttttcatggtgtgggattaagatgctttctggttcctttcaaggacattaaaaagatagtcacttgaggagatgtcatagtttatgttgggttgttttctggaactttgagtagactttatgccttaattttttttttttgagacatagtcttattctgtcacccaggctggagtgcagtggcatgatctcggttcactgcaacctccgcctcccgagttcaagtgattctcctgtctcaacctcccaagtagctgggattactggcacgcgccagcacgcctggctaatttttgtatttttagtagagatgggttttcaccatgttggccaggctggtctcaaactcctggcctcaggtgatctgcccgcctcagccctccaaagtgctgggattacaggcgtgagccaccgtgcccggcctgacttaatttttttaaattcttttccatatacaactttcacgttccagtcattatggccttaacagtgaacatatcacaatgtcaggatgaaacaatgatcttttgtactgtgagatttctgggagcaaaggttaagacaaatcaccccatggttacaaaattctgatttctagagatatgagatagatatgagatagatgagatttctagagataaatgtcatctctcctgtcttctctgcctagttctcggctccctgagtctaggctggtaggattctaagcagagaaagcataagctatatgtagttaagccctgctggagcctggggaccaagtaatttgtgtgtaataagtgctgtgacatgctaccaagtttttattgtcccctgtcaagggcatctttactgaatccgaagatgctgatttgattcttccttgttgtctacctctgcaaggctgatggtcccgcttagtgtaatttcttcgctgagcactgtgggccgcagggtatttcttgctcaggggatgttttgacaagctagcctctctagggcccctgtacgtagcgaccctcatagacactccctcccagtgctggcttccaggtgggcaccagaggcgagagtaggggctcaccatcaaatcgccgctgtgctccccaaaactaggtgggcagaaagctaaaaaagtacaaaaaccattcaaattaatagcagttagtctggggatacaacacatgtgaaaacataactcaacaacaacaaaatcaatatgttaacagaaattgaaaactttgcggctgggggttggtcctcaagctttaatgcacactctaaccctggggtgctggtgaacgtcaagtcccaggtctcaggcctctgaagcctgacagatggaggtgccagggtgcacatgctcacggcaccctggcgaccctgacctcaatggggtcccgaggacatggaaggagaaatactttgaaaggcgaagcaactggctgggcagggaggccaaggcgggcggaacacttgaggtcaggagttcgagaccagcctggccaacacggtgacaccccgtctctactaaaaatacaaaaattagccaggcatggtggtgggtgcctgtaatcccagctacttgggaggttaagccaggagaatcacttgaacctgggagacggaggttgcagtgagccgagattgtgccacttcactccagcctgggcaacagagcaagatgccatctcaaataaataaataagaaaggagaagcgacatcagagggggcaaggctgatcagggaaagcatcctagagttgagactgggggggtttcatgtgaggaggtgaaggctgtggcacattgtaaaggaagcagtgatttaaaatgcaaggagaggccgggcgcagtggctcacgcctgtaatcccagcacttgggaggctgaggctggcagatcacttgaggtcaggagtttgagaccagcctggccaacatagttgaaaccccttctctactacagatacaaaaattagccaggcataatggcgcatgcctgtaatcccagctacttgggagcctgagacacgagaaactcttgaaaccaggaggcaaaggttgcagtgagcagagattgtggcactgcattccagcctgggtgacagagagagacagtctcaaat

SEQ ID NO: 152 - protein, 203 aa, Homosapiens
MGPQPRAEAAWQFFMSDKPLHLAVSLNKEIYFHGEPIPVTVTVTNNTEKTVKKIKAFVEQVANVVLYSSDYYVKPVAMEEAQEKVPPNSTLTKTLTLLPLLANNRERRGIALDGKIKHEDTNLASSTIIKEGIDRTVLGILVSYQIKVKLTVSGFLGELTSSEVATEVPFRLMHPQPEDPGQLCPFLAFFNYLLLADLLLMYF

SEQ ID NO: 153 - DNA, 1026 bp, Homosapiens
cttgagcccaggaggtcgaggctacagtgacctatgatcatgccattgcattccagcctaggtgataaaatgagaccctgtctcaaaaaaaaaaaaaagtcaatcccagcaaagagggggatctcaagcttgtaccccttttttccctttggaggtatcctctcttcaccaggtacttggccatactccgcaagtccagataaagatattctgtcctcttttaaaaattatttttatttttttttgagataaggtctcagtctgtcacccaggctggagtgcagtagcgcgttcttggctcactgcaacctccacctcccaagttcaagggattctcctggctcagcctcctgagtagctgggattagaggctcccaccaccacgcctggctaattttgtactttcaatagagatggggtttcgccatgttgtccaggctggtcttgaatttcctgaactcaagcgatctgcccgcctccgtctcccaaagtgctgggattaaaggtgtgagccacgacgtctggctattctgtcctcttttaaatgagctccagacgccagtgagctgaaggagctctctggggagcactgtggtcctggaaacacgtgcttgagacacctcccctcagaggttcccgagctgacgtcttcttccaggcccagcacctgctggccgccgccccaactctttttccagagctgttccatccttccctgccttctgcctgtagccttcaggtttcttgggctttttttctatcattatttacatgatttttgttagatgcaaatttagtttttgaggagtttgctcgccataatctgaaagatgcaggagaagctgaggaggggaagagagacaagaatgacgttgatgagtgaagatgtcggctcaggatgccggaaaatgacctgtagttaccagtgcaacgagcaaagccccacagtttagtcctttggagttatgctgcgtatgaaaggatgagtcttcttccgagaaataaagcttgtttgttctcccctgg

SEQ ID NO: 154 - protein, 72 aa, Homosapiens
MIMPLHSSLGDKMRPCLKKKKKSIPAKRGISSLYPFFPFGGILSSPGTWPYSASPDKDILSSFKNYFYFFLR

SEQ ID NO: 155 - DNA, 1032 bp, Homosapiens
gccaggtctgatgctgggtgctggggacacacagctggatatcttggaaggcaggagagaaggagggggcattctggtgcagggttgtgttggcaagactggcgcggggggcgctgggacacagctgggggtgaagtagcaaaggcaggccagggcagctcacaggctgcttctgaggctgaacctgcagatggccacagagctcagagaaggggcctggcacgtgggagatgagttactgagataatccaggcaggcaaagcctgctggaggacttggggacttgcagttttggcaagtggtaggagggagttgctgaggaggatgaccgggggatgtgcatctatagaggtcaagcacagagaagggggttgcatgctctgccctctgggaacttctagaggagaagacacaggaattcctccagtgcgtgcaaggagtccccatacccactccccaagtacatgaacttctaggactttggaagctcagtgagttcaccagtccctggagaacctccatgacggcatgcctgcctcgaatggaaaggctgcccatctgctcttcaccctcctctgctctccatcattctccttttcccttctgtttgggcagcattaaggagggcatagaccggaccgtcctgggaatcctggtgtcttaccagatcaaggtgaagctcacagtgtcaggctttctgggagagctcacctccagtgaagtcgccactgaggtcccattccgcctcatgcaccctcagcctgaggacccagctaaggaaagttatcaggatgcaaatttagtttttgaggagtttgctcgccataatctgaaagatgcaggagaagctgaggaggggaagagagacaagaatgacgttgatgagtgaagatgtcggctcaggatgccggaaaatgacctgtagttaccagtgcaacgagcaaagccccacagtttagtcctttggagttatgctgcgtatgaaaggatgagtcttcttccgagaaataaagcttgtttgttctcccctgg

SEQ ID NO: 156 - protein, 122 aa, Homosapiens
MTACLPRMERLPICSSPSSALHHSPFPFCLGSIKEGIDRTVLGILVSYQIKVKLTVSGFLGELTSSEVATEVPFRLMHPQPEDPAKESYQDANLVFEEFARHNLKDAGEAEEGKRDKNDVDE

SEQ ID NO: 157 - DNA, 6297 bp, Homosapiens
tggcccggcagcatggcggcggcggcgggcgcccctccgccgggtcccccgcaaccgcctccgccgccgccgcccgaggagtcgtccgacagcgagcccgaggcggagcccggctccccacagaagctcatccgcaaggtgtccacgtcgggtcagatccgacagaagaccatcatcaaagaggggatgctgaccaaacagaacaattcattccagcgatcaaaaaggagatactttaagcttcgagggcgaacgctttactatgccaaaacggcaaagtcaatcatatttgatgaggtggatctgacagatgccagcgtagctgaatccagtaccaaaaacgtcaacaacagttttacggtcataactccatgcaggaagctcatcttgtgtgctgataacagaaaagaaatggaagattggattgcagcattaaagactgtgcagaacagggagcactttgagcccacccagtacagcatggaccacttctcagggatgcacaattggtacgcctgttcccacgcgaggccgacctactgcaatgtgtgccgtgaggctctgtctggggtcacgtcgcacgggctgtcctgcgaggtgtgcaaatttaaggcccacaagcgctgtgctgtgcgtgcaaccaataactgcaagtggaccacactggcctcgatcgggaaggacatcattgaagatgcagatgggattgcaatgccccaccagtggttggaaggaaacctacctgtgagcgccaagtgcactgtgtgcgacaagacctgtggcagtgtgctgcgcctgcaggactggcgctgcctctggtgcaaggccatggttcacacatcgtgtaaagaatccttgctgaccaagtgcccacttggcctgtgcaaagtgtcagtcatcccacccacggctctcaacagcatcgactccgatgggttctggaaggccagctgtcctccttcttgcacaagcccactgttggtcttcgtcaattcaaaaagtggggacaaccagggtgtgaagttcctcagaagattcaaacagctactaaaccccgcccaggtcttcgacctcatgaacggaggcccacacctcggcttacggttattccagaagtttgacacattccggattctggtttgtggcggggatggaagtgttggctgggtcctctccgaaatcgacagcctcaaccttcataaacagtgtcagctgggagtgctgccgctcggcacagggaacgacttggcccgagtactgggctggggctcagcctgcgatgacgacacccagctcccccagatcttggagaagttggagagagccagcaccaagatgctggacaggtggagcgtcatggcatacgaggccaagctcccccggcaggcctcctcctctaccgtcaccgaagacttcagcgaggattccgaggtacagcagattctcttctatgaagactcggttgcagcccacctttctaaaatcctcacctcggaccagcactcggtggtcatctcctcggccaaagtgctctgtgagacggtgaaggacttcgtggcacgggtggggaaggcctatgagaagacgaccgagagctcggaggagtcagaggtcatggccaagaagtgctctgtcctgaaagagaagctggattcccttctcaagaccttggacgatgagtcccaggcctcgtcctctctgcccaacccgccccccaccattgccgaggaggctgaagatggagatgggtcgggcagcatctgcggttccaccggagaccgcttggtggcatcagcttgcccggcccggccgcagatattccggcctcgagaacagctcatgctgagagccaacagcctgaagaaagcaattcgtcagatcatagaacacacagaaaaagctgtcgatgagcagaatgcccagacccaggagcaggagggcttcgtcctgggcctctctgagtcagaggagaagatggaccacagagtgtgcccaccactgtcccacagcgagagcttcggggtccccaaggggaggagccagcgcaaagtgtcgaaatctccgtgtgaaaagctgatcagcaaagggagtctgtccctaggcagttctgcttcccttccgccccagccgggaagccgggacggcctgcctgcgctcaacaccaagatcctgtacccaaatgtccgggctggaatgtctggttccttacccggtggctcagtcatcagtcgcctgttaattaatgctgatcccttcaactctgaaccagaaaccctagagtattacacggagaaatgtgtcatgaacaactattttggcattggcctggatgcgaagatatccctggactttaacaacaagcgcgatgagcacccagagaagtgcaggagccgaaccaagaacatgatgtggtatggagttcttggaaccaaagagttgctgcacagaacctacaagaacctggagcaaaaggtcttgctggagtgtgacgggcgacccatcccactccccagtcttcagggaattgctgtccttaacattcccagctatgccggaggaaccaacttctgggggggtaccaaggaagatgatactttcgcagctccatcattcgatgacaagattctggaggtggtcgccgtgttcggcagcatgcagatggccgtctctcgagtcatcaggctacagcatcatcggatcgcccagtgtcgcacggtgaagatctccatccttggggatgagggcgtgcctgtgcaggtggacggagaggcctgggtccagccgccagggtacattcggattgtccacaagaaccgggcacagacactgaccagagacagggcatttgagagcaccctgaagtcctgggaagacaagcagaagtgcgagctgccccgccctccatcctgttccctgcacccggagatgctgtccgaggaggaggccacccagatggaccagtttgggcaggcagcaggggtcctcattcacagtatccgagaaatagctcagtctcaccgggacatggagcaggaactggcccacgccgtcaatgccagctccaagtccatggaccgtgtgtatggcaagcccagaaccacagaggggctcaactgcagcttcgtcctggaaatggtgaataacttcagagctctgcgcagtgagacggagctgctgctgtctgggaagatggccctgcagctggatccgcctcagaaggagcagctggggagtgctcttgccgagatggaccgacagctcaggaggctggcagacaccccgtggctctgccagtccgcagagcccggcgacgaagagagtgtgatgctggatcttgccaagcgcagtcgcagtggtaaattccgcctcgtgaccaagtttaaaaaggagaaaaacaacaagaacaaagaagctcacagtagcctgggagccccggttcacctctgggggacagaggaggttgctgcctggctggagcacctcagtctctgtgagtataaggacatcttcacacggcacgacatccggggctctgagctcctgcacctggagcggagggacctcaaggacctgggcgtgaccaaggtgggccacatgaagaggatcctgtgtggcatcaaggagctgagccgcagcgcccccgccgtcgaggcctagcctctgtcctctcagcctgtggcctccacatccccgccgccgaggcctagcctccgccctctcagcctgtggcctctgcgcctcctgccactgaggccctgggcagatgctgcagcccgcccccttctcatggtgctacttcctctgtcagctacagaaagcctccgtgacaccgtccaccagagctctggggtctcgaacataacaacacagctacctttgaaacaacactttctccagctcagagtcacctggggcacatgtgtcacggccactcagctctcgcccgcctgtgctgtgggccagggaatccagcggcgtctggcctcctgggcactgcttgcctggcctcgtgcttggattgtcccgggggctcctctccgtgtgtccttctgtggccgcaccgtgtggctccgcctcctggcccccagccagttctcagaaacgtggctggggcccagcacagcagcctgcaagggcccctgtttgttgatgcagcttttgttgaacaaaaatcgtgctctttcctggtttgaaagtagcatggatgtttccagtcttgttgattgtaatttgacgtgaagagaaaaaaaaattcctcctgcgtgagccaaggcagcgggtgctgtttcccaggcggggagcccctccctgggtgtcacagggcctgtgctcctccctcctccatcctctctcctcccgctcctccctccccccactgtgggctggggacgcctgcccttctgtctccggacgctctaggcgagttcagcttggggtgtgagtgagacagcttgccagctgcatccctgcagacagaggatgtgtgtccacatgagtgtttctgtgtgggaaatgcttcctggctctgggaaactttttctgcccattctgtggttcccagggagcgtggccctggtgggccaggggtggtttgacctcttcagcccgtccggtggcctggaggccggaggctctcctgagtgtctgcccctgcagtggcttcttgtcgcctgctgctgggcgtgatgtcgctggaggtgctggcagggactctgatttggtggtccgcgctgcccctgccctgcctctgtcctggctctgaactagtagatgatggtgccagagggcagggagctcgcctggggagagggctgtgccccgtagggacagtgcccaggtgaaggatgcccctggtcctccagggcactgactttgcccttttttcccgttgatagtcatggctcagaggtgcttgtaaatgtcttgggaagaggtttctgtaacccctgccctggtgtgaggaggaaatggctctggcctggctgcctggccgtggcttctctttggctcccaaagagaaggacagtgttgggagtatctgccgtggcttctctttggctcccaaagagaaggacagtgttgggagtatctgccggcgctgtccaggtcctttagtcagcgtcactccatctgatgtgcagaagctgggctgcacctgcgggggtgggcatagaccgggctgggtctgcagcagcccctggtcctgagcaggcggcagtgaacagcactggcccacctcccactcacagcccctctgtcccctctgcagtgcacccaggtgggcccctctgcgtgcctttgggtgctcccctctcgtggtcgttctggcccgaggcccttagagtatggaggctgagccaggccttgggtttccccagcacagcctcctgtcgctgcatgcgacgtgttgggatttttggatgaaagactctcccacgctctgttggtggacttagctgcctcactggaagtgatgtgggtggaaggtggttgtatgttaccttttccacctctcattgttttccccagaacattgtagatgggggttggcagagggagaaataagccagccacggcagtcgcttggtttcccaggtggaatgggctaacacaggagatgatgggaacctgtcccgcagtccctgcatgaccattggccctgctggcctggcgatgtgggcatcctggggttcttagggtcccagaacaagccccaggcaagctggaacttgggtggggaggggacatgaggaggataaacagctgactgtggcttcaaggacatcagggccaccccaagtcctcagtgtcctactcctggcaaggagttgggtttggatcaaaagtgtttaaaattaatatgttgtcagtgattagaacaacactgtttacataaaaaccatttttctaattctaacaagttagaatgtgaggaaggaatgaacatgagtgtttaggaacctgccctttggtgctgggctggcgtcccgcactggggtgtcctcgctgtctgggggctgctctgctgccccggcccaggtccccttgtggtgttgccagacgggcctcatggtctgctgtgcagagagaggcaggaaggatccctgaagagtcttggagaaaaggttctgtgccctcaggtggggcttaccccctcgtatttataatcttaatttatatagtgaccaccgtggaaacaaacgcctcttgtattgtcatgtacatagtccatacctgagtgctgtacataagttgttctgtgtataaataaaacaagcctgtttttgatcttccatc

SEQ ID NO: 158 - protein, 1214 aa, Homosapiens; identical to SEQ ID NO: 24

SEQ ID NO: 159 - DNA, 621 bp, Homosapiens
cgccgcccgaggagtcgtccgacagcgagcccgaggcggagcccggctccccacagaagctcatccgcaaggtgtccacgtcgggtcagatccgacagaagaccatcatcaaagaggggatgctgaccaaacagaacaattcattccagcgatcaaaaaggagatactttaagcttcgagggcgaacgctttactatgccaaaacggcaaagtcaatcatatttgatgaggtggatctgacagatgccagcgtagctgaatccagtaccaaaaacgtcaacaacagttttacggctgaagtgcggtggtgtgatctcggctcactgcaacctccgtctcccaggttcaagggatcctcatgcctcagcctccctagtagctgggattatagtcgtgcaccgttatgcccagataatcttcgtaattttagtagagatggggtttcaccatattggccaggctggtctcaaactcctggcctggagtgatctacccgcctgaaccttccaaagtactgggattacaggcatgagccactgtgcctggccctgggcattaatttagatgttcattttggtttcagttatttgcatatttcctaataaaaaaattattcttggt

SEQ ID NO: 160 - protein, 122 aa, Homosapiens
MLTKQNNSFQRSKRRYFKLRGRTLYYAKTAKSIIFDEVDLTDASVAESSTKNVNNSFTAEVRWCDLGSLQPPSPRFKGSSCLSLPSSWDYSRAPLCPDNLRNFSRDGVSPYWPGWSQTPGLE

SEQ ID NO: 161 - DNA, 6232 bp, Homosapiens
agagacacgaatatgtttcagccgcaacaggctgcgtttcagccggaagagtgaaagggcaccttgaaaacgcaagtttatgaatatgtttctgtactttcagaccatcatcaaagaggggatgctgaccaaacagaacaattcattccagcgatcaaaaaggagatactttaagcttcgagggcgaacgctttactatgccaaaacggcaaagtcaatcatatttgatgaggtggatctgacagatgccagcgtagctgaatccagtaccaaaaacgtcaacaacagttttacggtcataactccatgcaggaagctcatcttgtgtgctgataacagaaaagaaatggaagattggattgcagcattaaagactgtgcagaacagggagcactttgagcccacccagtacagcatggaccacttctcagggatgcacaattggtacgcctgttcccacgcgaggccgacctactgcaatgtgtgccgtgaggctctgtctggggtcacgtcgcacgggctgtcctgcgaggtgtgcaaatttaaggcccacaagcgctgtgctgtgcgtgcaaccaataactgcaagtggaccacactggcctcgatcgggaaggacatcattgaagatgcagatgggattgcaatgccccaccagtggttggaaggaaacctacctgtgagcgccaagtgcactgtgtgcgacaagacctgtggcagtgtgctgcgcctgcaggactggcgctgcctctggtgcaaggccatggttcacacatcgtgtaaagaatccttgctgaccaagtgcccacttggcctgtgcaaagtgtcagtcatcccacccacggctctcaacagcatcgactccgatgggttctggaaggccagctgtcctccttcttgcacaagcccactgttggtcttcgtcaattcaaaaagtggggacaaccagggtgtgaagttcctcagaagattcaaacagctactaaaccccgcccaggtcttcgacctcatgaacggaggcccacacctcggcttacggttattccagaagtttgacacattccggattctggtttgtggcggggatggaagtgttggctgggtcctctccgaaatcgacagcctcaaccttcataaacagtgtcagctgggagtgctgccgctcggcacagggaacgacttggcccgagtactgggctggggctcagcctgcgatgacgacacccagctcccccagatcttggagaagttggagagagccagcaccaagatgctggacaggtggagcgtcatggcatacgaggccaagctcccccggcaggcctcctcctctaccgtcaccgaagacttcagcgaggattccgaggtacagcagattctcttctatgaagactcggttgcagcccacctttctaaaatcctcacctcggaccagcactcggtggtcatctcctcggccaaagtgctctgtgagacggtgaaggacttcgtggcacgggtggggaaggcctatgagaagacgaccgagagctcggaggagtcagaggtcatggccaagaagtgctctgtcctgaaagagaagctggattcccttctcaagaccttggacgatgagtcccaggcctcgtcctctctgcccaacccgccccccaccattgccgaggaggctgaagatggagatgggtcgggcagcatctgcggttccaccggagaccgcttggtggcatcagcttgcccggcccggccgcagatattccggcctcgagaacagctcatgctgagagccaacagcctgaagaaagcaattcgtcagatcatagaacacacagaaaaagctgtcgatgagcagaatgcccagacccaggagcaggagggcttcgtcctgggcctctctgagtcagaggagaagatggaccacagagtgtgcccaccactgtcccacagcgagagcttcggggtccccaaggggaggagccagcgcaaagtgtcgaaatctccgtgtgaaaagctgatcagcaaagggagtctgtccctaggcagttctgcttcccttccgccccagccgggaagccgggacggcctgcctgcgctcaacaccaagatcctgtacccaaatgtccgggctggaatgtctggttccttacccggtggctcagtcatcagtcgcctgttaattaatgctgatcccttcaactctgaaccagaaaccctagagtattacacggagaaatgtgtcatgaacaactattttggcattggcctggatgcgaagatatccctggactttaacaacaagcgcgatgagcacccagagaagtgcaggagccgaaccaagaacatgatgtggtatggagttcttggaaccaaagagttgctgcacagaacctacaagaacctggagcaaaaggtcttgctggagtgtgacgggcgacccatcccactccccagtcttcagggaattgctgtccttaacattcccagctatgccggaggaaccaacttctgggggggtaccaaggaagatgatactttcgcagctccatcattcgatgacaagattctggaggtggtcgccgtgttcggcagcatgcagatggccgtctctcgagtcatcaggctacagcatcatcggatcgcccagtgtcgcacggtgaagatctccatccttggggatgagggcgtgcctgtgcaggtggacggagaggcctgggtccagccgccagggtacattcggattgtccacaagaaccgggcacagacactgaccagagacagggcatttgagagcaccctgaagtcctgggaagacaagcagaagtgcgagctgccccgccctccatcctgttccctgcacccggagatgctgtccgaggaggaggccacccagatggaccagtttgggcaggcagcaggggtcctcattcacagtatccgagaaatagctcagtctcaccgggacatggagcaggaactggcccacgccgtcaatgccagctccaagtccatggaccgtgtgtatggcaagcccagaaccacagaggggctcaactgcagcttcgtcctggaaatggtgaataacttcagagctctgcgcagtgagacggagctgctgctgtctgggaagatggccctgcagctggatccgcctcagaaggagcagctggggagtgctcttgccgagatggaccgacagctcaggaggctggcagacaccccgtggctctgccagtccgcagagcccggcgacgaagagagtgtgatgctggatcttgccaagcgcagtcgcagtggtaaattccgcctcgtgaccaagtttaaaaaggagaaaaacaacaagaacaaagaagctcacagtagcctgggagccccggttcacctctgggggacagaggaggttgctgcctggctggagcacctcagtctctgtgagtataaggacatcttcacacggcacgacatccggggctctgagctcctgcacctggagcggagggacctcaaggacctgggcgtgaccaaggtgggccacatgaagaggatcctgtgtggcatcaaggagctgagccgcagcgcccccgccgtcgaggcctagcctctgtcctctcagcctgtggcctccacatccccgccgccgaggcctagcctccgccctctcagcctgtggcctctgcgcctcctgccactgaggccctgggcagatgctgcagcccgcccccttctcatggtgctacttcctctgtcagctacagaaagcctccgtgacaccgtccaccagagctctggggtctcgaacataacaacacagctacctttgaaacaacactttctccagctcagagtcacctggggcacatgtgtcacggccactcagctctcgcccgcctgtgctgtgggccagggaatccagcggcgtctggcctcctgggcactgcttgcctggcctcgtgcttggattgtcccgggggctcctctccgtgtgtccttctgtggccgcaccgtgtggctccgcctcctggcccccagccagttctcagaaacgtggctggggcccagcacagcagcctgcaagggcccctgtttgttgatgcagcttttgttgaacaaaaatcgtgctctttcctggtttgaaagtagcatggatgtttccagtcttgttgattgtaatttgacgtgaagagaaaaaaaaattcctcctgcgtgagccaaggcagcgggtgctgtttcccaggcggggagcccctccctgggtgtcacagggcctgtgctcctccctcctccatcctctctcctcccgctcctccctccccccactgtgggctggggacgcctgcccttctgtctccggacgctctaggcgagttcagcttggggtgtgagtgagacagcttgccagctgcatccctgcagacagaggatgtgtgtccacatgagtgtttctgtgtgggaaatgcttcctggctctgggaaactttttctgcccattctgtggttcccagggagcgtggccctggtgggccaggggtggtttgacctcttcagcccgtccggtggcctggaggccggaggctctcctgagtgtctgcccctgcagtggcttcttgtcgcctgctgctgggcgtgatgtcgctggaggtgctggcagggactctgatttggtggtccgcgctgcccctgccctgcctctgtcctggctctgaactagtagatgatggtgccagagggcagggagctcgcctggggagagggctgtgccccgtagggacagtgcccaggtgaaggatgcccctggtcctccagggcactgactttgcccttttttcccgttgatagtcatggctcagaggtgcttgtaaatgtcttgggaagaggtttctgtaacccctgccctggtgtgaggaggaaatggctctggcctggctgcctggccgtggcttctctttggctcccaaagagaaggacagtgttgggagtatctgccgtggcttctctttggctcccaaagagaaggacagtgttgggagtatctgccggcgctgtccaggtcctttagtcagcgtcactccatctgatgtgcagaagctgggctgcacctgcgggggtgggcatagaccgggctgggtctgcagcagcccctggtcctgagcaggcggcagtgaacagcactggcccacctcccactcacagcccctctgtcccctctgcagtgcacccaggtgggcccctctgcgtgcctttgggtgctcccctctcgtggtcgttctggcccgaggcccttagagtatggaggctgagccaggccttgggtttccccagcacagcctcctgtcgctgcatgcgacgtgttgggatttttggatgaaagactctcccacgctctgttggtggacttagctgcctcactggaagtgatgtgggtggaaggtggttgtatgttaccttttccacctctcattgttttccccagaacattgtagatgggggttggcagagggagaaataagccagccacggcagtcgcttggtttcccaggtggaatgggctaacacaggagatgatgggaacctgtcccgcagtccctgcatgaccattggccctgctggcctggcgatgtgggcatcctggggttcttagggtcccagaacaagccccaggcaagctggaacttgggtggggaggggacatgaggaggataaacagctgactgtggcttcaaggacatcagggccaccccaagtcctcagtgtcctactcctggcaaggagttgggtttggatcaaaagtgtttaaaattaatatgttgtcagtgattagaacaacactgtttacataaaaaccatttttctaattctaacaagttagaatgtgaggaaggaatgaacatgagtgtttaggaacctgccctttggtgctgggctggcgtcccgcactggggtgtcctcgctgtctgggggctgctctgctgccccggcccaggtccccttgtggtgttgccagacgggcctcatggtctgctgtgcagagagaggcaggaaggatccctgaagagtcttggagaaaaggttctgtgccctcaggtggggcttaccccctcgtatttataatcttaatttatatagtgaccaccgtggaaacaaacgcctcttgtattgtcatgtacatagtccatacctgagtgctgtacataagttgttctgtgtataaataaaacaagcctgtttttgatcttccatc

SEQ ID NO: 162 - protein, 1170 aa, Homosapiens; identical to SEQ ID NO: 22

SEQ ID NO: 163 - DNA, 424 bp, Homosapiens
tcattccctccagggaaagattttcctttgatcttctccattttctcttgggttttcacatgttttcattgacttaggatttctcccctgatttattaaactttgtgttatagtaattttagttgttgtcttcaagtcctacgcttgtttgctttttttgagacacctgggcaacaagagtgaaactctgtctaaaaaaaaaaaaaagaaagaaaaaaaaagaggtgatcaggccaggagggctctgctctggggatggattaatgctgttattgtaggggtcagttcctaataaagggatgagttcatctcctcccccttgttctcactgtcacctttgacgcagcatgaagcccctcaccagatgccgcaccatgctcttagactttcgaactatgaggcaaataaacttctgttcatttaa

SEQ ID NO: 164 - protein, 66 aa, Homosapiens [sequence omitted]

SEQ ID NO: 165 - DNA, 270 bp, Homosapiens
cggggatgtgtggagtggtggtcagctctaacgtgtcccttgcagactttcgcagctccatcattcgatgacaagattctggaggtggtcgccgtgttcggcagcatgcagatggccgtctctcgagtcatcaggctacagcatcatcggatcgcccagtgtcgcacggtgaagatctccatccttggggatgagggcgtgcctgtgcaggtggacggagaggcctgggtccagccgccagggtacattcggattgtccacaagaaccgg

SEQ ID NO: 166 - protein, 54 aa, Homosapiens
MQMAVSRVIRLQHHRIAQCRTVKISILGDEGVPVQVDGEAWVQPPGYIRIVHKN

SEQ ID NO: 167 - DNA, 535 bp, Homosapiens
tgcaaggttcgactgctgactttgcttcccacagcatttccactgcttgacacaggtgaatggctccgaccccatttctgacagagggacacaagcaggtcagttgtcagccttgctctatgtgaattcatcgttgactgatggacagttttattctctcaccagcactacttagaaagtgaggttctgggtttggttccttttctggtgctctgggacttcgtttctggaaagtgagctccctgatcagagcagagcagagccctggagcggacctcacccccctgggcctcgcgctgatcagcagtgcacactctccatttctctctccctccctccgcctggagcagcagctggatccgcctcagaaggagcagctggggagtgctcttgccgagatggaccgacagctcaggaggctggcagacaccccgtggctctgccagtccgcagagcccggcgacgaagagagtgtgatgctggatcttgccaagcgcagtcgcagtggtaaattccgcctcgtgaccaagtttaa

SEQ ID NO: 168 - protein, 44 aa, Homosapiens
MDRQLRRLADTPWLCQSAEPGDEESVMLDLAKRSRSGKFRLVTK

SEQ ID NO: 169 - DNA, 2729 bp, Homosapiens
gagagattcctgtgacttttaaaatgatgttatcattacttgagatactctttccttgagatgccactgtgtagtgcttcattttttttttctaaaacagtatgttttgaagagtgctttttaaaaccgttggagaaatgtctgtttctttttctaggccatgaccttgcctcctttcctggagttcggtgtcccgtccccagcccacctcagagcctggacggtggagaggaagcgcccaggcaggcttttacgaactgaccggcagccactcagggaatataaactaggacggagaattgagatctgcttagagccccttcagaaaggcgaaaacttgggcccccaggacgtgctgctgaggacacaggtgcgcatccctggtgagaggacctatgcccctgccctggacctggtgtggaacgcggcccagggtgggactgccggctccctgaggcagagagttgccgatttctatcgtcttcccgtggagaagattgaaattgccaaatactttcccgaaaagttcgagtggcttccgatatctagctggaaccaacaaataaccaagaggaaaaagaaaaaaaaacaagattatttgcaaggggcaccgtattacttgaaagacggagatactattggtgttaagaatctcctgattgacgacgatgatgatttcagtacaatcagagatgacactggaaaagaaaagcagaaacaacgggccctggggagaaggaaaagccaagaagccctccatgagcagagcagctacatcctctccagtgcagagacgcctgcccggccccgagccccggaaacttctctctccatccacgtggggagcttcagataaccgcgccgctgcacggctctactcccgatgaactctccggctgatgccacaaacgtgggtttcctgggcatggggactggctgcctggcgcctccaatcccaaatcctctgcttcctttgagcacagggacggctcctctgaggcctggccagtgcatgtagtcacttagctctgcaacacgtggcagccacgggggctggtgcagctctggatgtcgcccacccagctgccagtaggtgctgggctctctcacacagcacccggccccagctgcctttttttttcttttaaccagaaaatgcacaacgtgtgcgtgaaccgcaggtatggaggcagcggcatgccgttgctccgctgtgggaggtgtgtggggtcaggccagccactttcctccgtgttcagatgactctcgttcgccctgaccggcttctcacagtgtctcaggccactgcgccaccgcgctggtgctgagcagaagcgggcagaagtggggtctgctttcaggacttcatttcccccactcgttccggccccgcatgctccacgtctgccctttggtctgagttaaaactgcgatgctgaaaagtgcgagctctttccacgaggaggagccacacagggtggcctccgagggtgagtcgctctgctaagcaagggcagccgctgcacgtcagcccgcaggccaagggtccagcttatcctgggtgctctgtgatcagaaggtccttggatcccgaggactgcagctgctgccgtccacagcgcctcagcctctcttcctgtgtggaagcggggcaggcagggctgtggcagacaggcctggcatagcccaggttccaggtgtcctgggcagcctgaccggtttcctgagtagcctcaatgaaaacacctgagaaaaagaaaatgtaaactaaggaagggttttcccacttaatccaacccagatttctattcaacttaaaggatttaattggcatttgtgagaaataatagtacctgtgtcactgagttgattgatttgggacatagacggttgactttcccagacagcagcttagcggaaagcagcatcccgaagacggtgtcgcatgtcctgagcctgcttgtcacctgggcctcacggtttctcgtcagccccgtcactgatgggaagcagcactgaagtgtgagggcagaaaggacaccgctggagtcaggcgctcccctgcctgtgacccttttccaacaagctgatgctgagccagcggcctgctttgtccctcatactcctcccaacagtccaaacccctaccagacagaagccacgtcgcttctgcacacgtgtctgagagcgtctgccatagacgtctgtgcgtttccgtgaagcactgcgccctaaggacccaactctgactagcagctgcctcccactcccaaacactaaccccgctcaggagactcgcactgggtgtagactgcgtctttgcagagggagatgatagaggcttctgatgacgccagagctgtaagtgtcgtgacgagctgggcgcccagcccttcttaagctgttctgtttctgtggctttaactgacatatttctgtagcatctgccttcatctcatctcagcgtaatgaaatattaatgaaatcgctgaaaagctttgccttcgagaggccagaagcctcgcggaatgtctgcaagtccaaagacgcgtgtgggttgtgccctgaagtgccgtccagcaggcgcgtgcggccgggccggcctgtgcgtgtggcctttgccttcttccctttcttcctgttttctgtttttttaatttggggattgagaaagctgtacgattttgttaaagaaaaaaataaaccattttttaaagttgtagccctta

SEQ ID NO: 170 - protein, 231 aa, Homosapiens [sequence omitted]

SEQ ID NO: 171 - DNA, 5376 bp, Homosapiens
tattttctcttggcccagaagagcttggtttgtttgaagataaggataaacccgatgcaaaggttcgaatcatccctttacagttacagcgcttgtttgctcagcttctgctcttagaccaggaagctgcatccacagcagacctcactgacagctttgggtggaccagtaatgaggaaatgaggcaacatgatgtgcaggaactgaatcgaatcctcttcagcgctttggaaacttctttagttgggacctccggtcatgacctcatctatcgtctgtaccatggaaccattgttaaccagattgtttgtaaagaatgtaagaacgttagcgagaggcaggaagacttcttagatctaacagtagcagtcaaaaatgtatccggtttggaagatgctctctggaacatgtatgtagaagaggaagtttttgattgtgacaacttgtaccactgtggaacttgtgacaggctggttaaagcagcaaagtcggccaaattacgtaagctgcctccttttcttactgtttcattactaagatttaattttgattttgtgaaatgcgaacgctacaaggaaactagctgttatacattccctctccggattaatctcaagcccttttgtgaacagagtgaattggatgacttagaatatatatatgacctcttctcagttattatacacaaaggtggctgctacggaggccattaccatgtatatattaaagatgttgatcatttgggaaactggcagtttcaagaggaaaaaagtaaaccagatgtgaatctgaaagatctccagagtgaagaagagattgatcatccactgatgattctaaaagcaatcttattagaggagaataatctaattcctgttgatcagctgggccagaaacttttgaaaaagataggaatatcttggaacaagaagtacagaaaacagcatggaccactgcggaagttcttacagctccattctcagatatttctactcagttcagatgaaagtacagttcgtctcttgaagaatagttctctccaggctgagtctgatttccaaaggaatgaccagcaaattttcaagatgcttcctccagaatccccaggtttaaacaatagcatctcctgtccccactggtttgatataaatgattctaaagtccagccaatcagggaaaaggatattgaacagcaatttcagggtaaagaaagtgcctacatgttgttttatcggaaatcccagttgcagagaccccctgaagctcgagctaatccaagatatggggttccatgtcatttactgaatgaaatggatgcagctaacattgaactgcaaaccaaaagggcagaatgtgattctgcaaacaatacttttgaattgcatcttcacctgggccctcagtatcatttcttcaatggggctctgcacccagtagtctctcaaacagaaagcgtgtgggatttgacctttgataaaagaaaaactttaggagatctccggcagtcaatatttcagctgttagaattttgggaaggagacatggttcttagtgttgcaaagcttgtaccagcaggacttcacatttaccagtcacttggcggggatgaactgacactgtgtgaaactgaaattgctgatggggaagacatctttgtgtggaatggggtggaggttggtggagtccacattcaaactggtattgactgcgaacctctacttttaaatgttcttcatctagacacaagcagtgatggagaaaagtgttgtcaggtgatagaatctccacatgtctttccagctaatgcagaagtgggcactgtcctcacagccttagcaatcccagcaggtgtcatcttcatcaacagtgctggatgtccaggtggggagggttggacggccatccccaaggaagacatgaggaagacgttcagggagcaagggctcagaaatggaagctcaattttaattcaggattctcatgatgataacagcttgttgaccaaggaagagaaatgggtcactagtatgaatgagattgactggctccacgttaaaaatttatgccagttagaatctgaagagaagcaagttaaaatatcagcaactgttaacacaatggtgtttgatattcgaattaaagccataaaggaattaaaattaatgaaggaactagctgacaacagctgtttgagacctattgatagaaatgggaagcttctttgtccagtgccggacagctatactttgaaggaagcagaattgaagatgggaagttcattgggactgtgtcttggaaaagcaccaagttcgtctcagttgttcctgttttttgcaatggggagtgacgttcaacctgggacagaaatggaaatcgtagtagaagaaacaatatctgtgagagattgtttaaagttaatgctgaagaaatctggcctacaaggagatgcctggcatttacgaaaaatggattggtgctatgaagctggagagcctttatgtgaagaagatgcaacactgaaagaacttctgatatgttctggagatactttgcttttaattgaaggacaacttcctcctctgggtttcctgaaggtgcccatctggtggtaccagcttcagggtccctcaggacactgggagagtcatcaggaccagaccaactgtacttcgtcttggggcagagtttggagagccacttccagccaaggtgcttctgggaacgagcctgcgcaagtttctctcctctacttgggagacatagagatctcagaagatgccacgctggcggagctgaagtctcaggccatgaccttgcctcctttcctggagttcggtgtcccgtccccagcccacctcagagcctggacggtggagaggaagcgcccaggcaggcttttacgaactgaccggcagccactcagggaatataaactaggacggagaattgagatctgcttagagccccttcagaaaggcgaaaacttgggcccccaggacgtgctgctgaggacacaggtgcgcatccctggtgagaggacctatgcccctgccctggacctggtgtggaacgcggcccagggtgggactgccggctccctgaggcagagagttgccgatttctatcgtcttcccgtggagaagattgaaattgccaaatactttcccgaaaagttcgagtggcttccgatatctagctggaaccaacaaataaccaagaggaaaaagaaaaaaaaacaagattatttgcaaggggcaccgtattacttgaaagacggagatactattggtgttaagaatctcctgattgacgacgatgatgatttcagtacaatcagagatgacactggaaaagaaaagcagaaacaacgggccctggggagaaggaaaagccaagaagccctccatgagcagagcagctacatcctctccagtgcagagacgcctgcccggccccgagccccggaaacttctctctccatccacgtggggagcttcagataaccgcgccgctgcacggctctactcccgatgaactctccggctgatgccacaaacgtgggtttcctgggcatggggactggctgcctggcgcctccaatcccaaatcctctgcttcctttgagcacagggacggctcctctgaggcctggccagtgcatgtagtcacttagctctgcaacacgtggcagccacgggggctggtgcagctctggatgtcgcccacccagctgccagtaggtgctgggctctctcacacagcacccggccccagctgcctttttttttcttttaaccagaaaatgcacaacgtgtgcgtgaaccgcaggtatggaggcagcggcatgccgttgctccgctgtgggaggtgtgtggggtcaggccagccactttcctccgtgttcagatgactctcgttcgccctgaccggcttctcacagtgtctcaggccactgcgccaccgcgctggtgctgagcagaagcgggcagaagtggggtctgctttcaggacttcatttcccccactcgttccggccccgcatgctccacgtctgccctttggtctgagttaaaactgcgatgctgaaaagtgcgagctctttccacgaggaggagccacacagggtggcctccgagggtgagtcgctctgctaagcaagggcagccgctgcacgtcagcccgcaggccaagggtccagcttatcctgggtgctctgtgatcagaaggtccttggatcccgaggactgcagctgctgccgtccacagcgcctcagcctctcttcctgtgtggaagcggggcaggcagggctgtggcagacaggcctggcatagcccaggttccaggtgtcctgggcagcctgaccggtttcctgagtagcctcaatgaaaacacctgagaaaaagaaaatgtaaactaaggaagggttttcccacttaatccaacccagatttctattcaacttaaaggatttaattggcatttgtgagaaataatagtacctgtgtcactgagttgattgatttgggacatagacggttgactttcccagacagcagcttagcggaaagcagcatcccgaagacggtgtcgcatgtcctgagcctgcttgtcacctgggcctcacggtttctcgtcagccccgtcactgatgggaagcagcactgaagtgtgagggcagaaaggacaccgctggagtcaggcgctcccctgcctgtgacccttttccaacaagctgatgctgagccagcggcctgctttgtccctcatactcctcccaacagtccaaacccctaccagacagaagccacgtcgcttctgcacacgtgtctgagagcgtctgccatagacgtctgtgcgtttccgtgaagcactgcgccctaaggacccaactctgactagcagctgcctcccactcccaaacactaaccccgctcaggagactcgcactgggtgtagactgcgtctttgcagagggagatgatagaggcttctgatgacgccagagctgtaagtgtcgtgacgagctgggcgcccagcccttcttaagctgttctgtttctgtggctttaactgacatatttctgtagcatctgccttcatctcatctcagcgtaatgaaatattaatgaaatcgctgaaaagctttgccttcgagaggccagaagcctcgcggaatgtctgcaagtccaaagacgcgtgtgggttgtgccctgaagtgccgtccagcaggcgcgtgcggccgggccggcctgtgcgtgtggcctttgccttcttccctttcttcctgttttctgtttttttaatttggggattgagaaagctgtacgattttgttaaagaaaaaaataaaccattttttaaagttgtagccctta

SEQ ID NO: 172 - protein, 1107 aa, Homosapiens
MRQHDVQELNRILFSALETSLVGTSGHDLIYRLYHGTIVNQIVCKECKNVSERQEDFLDLTVAVKNVSGLEDALWNMYVEEEVFDCDNLYHCGTCDRLVKAAKSAKLRKLPPFLTVSLLRFNFDFVKCERYKETSCYTFPLRINLKPFCEQSELDDLEYIYDLFSVIIHKGGCYGGHYHVYIKDVDHLGNWQFQEEKSKPDVNLKDLQSEEEIDHPLMILKAILLEENNLIPVDQLGQKLLKKIGISWNKKYRKQHGPLRKFLQLHSQIFLLSSDESTVRLLKNSSLQAESDFQRNDQQIFKMLPPESPGLNNSISCPHWFDINDSKVQPIREKDIEQQFQGKESAYMLFYRKSQLQRPPEARANPRYGVPCHLLNEMDAANIELQTKRAECDSANNTFELHLHLGPQYHFFNGALHPVVSQTESVWDLTFDKRKTLGDLRQSIFQLLEFWEGDMVLSVAKLVPAGLHIYQSLGGDELTLCETEIADGEDIFVWNGVEVGGVHIQTGIDCEPLLLNVLHLDTSSDGEKCCQVIESPHVFPANAEVGTVLTALAIPAGVIFINSAGCPGGEGWTAIPKEDMRKTFREQGLRNGSSILIQDSHDDNSLLTKEEKWVTSMNEIDWLHVKNLCQLESEEKQVKISATVNTMVFDIRIKAIKELKLMKELADNSCLRPIDRNGKLLCPVPDSYTLKEAELKMGSSLGLCLGKAPSSSQLFLFFAMGSDVQPGTEMEIVVEETISVRDCLKLMLKKSGLQGDAWHLRKMDWCYEAGEPLCEEDATLKELLICSGDTLLLIEGQLPPLGFLKVPIWWYQLQGPSGHWESHQDQTNCTSSWGRVWRATSSQGASGNEPAQVSLLYLGDIEISEDATLAELKSQAMTLPPFLEFGVPSPAHLRAWTVERKRPGRLLRTDRQPLREYKLGRRIEICLEPLQKGENLGPQDVLLRTQVRIPGERTYAPALDLVWNAAQGGTAGSLRQRVADFYRLPVEKIEIAKYFPEKFEWLPISSWNQQITKRKKKKKQDYLQGAPYYLKDGDTIGVKNLLIDDDDDFSTIRDDTGKEKQKQRALGRRKSQEALHEQSSYILSSAETPARPRAPETSLSIHVGSFR

SEQ ID NO: 173 - DNA, 628 bp, Homosapiens
gagtcaagggcataactgcctacctcgagcccgctctcctcctgccagctgccgggctatcaagccaggcctctctcaccctgtccctctctgccacatcgtacctgctcaggccgccacctctttccttttctcccgcactgaggaagttccctaccacgtctgggggggctctgctgtgtaccgagaatgggatcttcacttccgctcttcattccaagattaaaggaaattgaaatgcggaataagagtttgccactagcatccagcatttagggaaaaatctctccttataaaaaccagaaaagctggaggagaagctttgcccattatgcctcaagttaccacgtggttttgtttgtttgtttggatctggcgcttgacggttttctggtacagcccccaggacgtgctgctgaggacacaggtgcgcatccctggtgagaggacctatgcccctgccctggacctggtgtggaacgcggcccagggtgggactgccggctccctgaggcagagagttgccgatttctatcgtcttcccgtggagaagattgaaattgccaaatactttcccgaaaagttcgagtggcttccgatatctagctggaaccaacaaataaccaag

SEQ ID NO: 174 - protein, 98 aa, Homosapiens
MPQVTTWFCLFVWIWRLTVFWYSPQDVLLRTQVRIPGERTYAPALDLVWNAAQGGTAGSLRQRVADFYRLPVEKIEIAKYFPEKFEWLPISSWNQQIT

SEQ ID NO: 175 - DNA, 2209 bp, Homosapiens
ctccaatacctaatatttaaaaattaccttttggaaactgatttataggacatattttcttccaggtatcttacctttatattgcagaaatccttaaccagaaacaaacacttctgttttctaaatgaaacaccattctttctgattatccgattctcattttactcacgggtttgatctagttatattttttccagctttattttcaaaatttttccatttttttgtgaattttattgcgataccaattatgaaataaaatcttcagttctcatctctgtatcacctcttaccattagatttaatttagtcatggatgagcctaattattgatggtaataacaatctcaactttaaacttggaagaagctacttcttcatttatggattgatttggattatctggcttttaatctatataaacaacagctctttgaacaagtcatttttattaagtaggaaactagactttcatagcttccatttagcattgttacatagaaaacaggaagacaatatcttaagagtatggaaattgaaaatcaaacctaatcttagtgcatgtaatccttttgtctgaagtgcaactcatttttcttctttcttgatattcttgattttcaaagaaatactgatttcagcatttatttttcttagagagctaggaattaataaccttcatcatattatcaaaatttttttaagtgccggacagctatactttgaaggaagcagaattgaagatgggaagttcattgggactgtgtcttggaaaagcaccaagttcgtctcagttgttcctgttttttgcaatggggagtgacgttcaacctgggacagaaatggaaatcgtagtagaagaaacaatatctgtgagagattgtttaaagttaatgctgaagaaatctggcctacaaggagatgcctggcatttacgaaaaatggattggtgctatgaagctggagagcctttatgtgaagaagatgcaacactgaaagaacttctgatatgttctggagatactttgcttttaattgaaggacaacttcctcctctgggtttcctgaaggtgcccatctggtggtaccagcttcagggtccctcaggacactgggagagtcatcaggaccagaccaactgtacttcgtcttggggcagagtttggagagccacttccagccaaggtgagaacagaatgggatttcagcagccagtgcatcataaagagaagtaaattgactgcctgtgctctgagagtcaattgatatatttatttttaaaacgtaagatcttgaaaatcaagacctattaatttcataagtcattccagacatcacataataataacactgtgccatttctgtacgtgctctgtaacctctgtaaagcactatatatcttgttgtttattattatatcaatatattacactttccaaagacttttatgtatcatctctcaagatcctcagggcaacaggggccccatttatcaccacgtaccagaatattgagacttcatccaattctaatgatgtcattttagcccacaggggcagagaccaggagtccacatcctacatgtcttccaatctttctgcctcaaaaccctcaggaactgcttctagggcatttgatatcatctcactgacttctgagaaggaacatagacaagtacaagcatgttgtcttactcagcactcagccgcacacatcacgatgggcagaagtcactatcagtgagttctgttgcccttgtacaaagaggagttccacttcattataaagaaatggagcgagtatatttttaataggcccaactctttagctatgtttttctttttatcaggctttacttatttagtttttctagtgccttgaagtatattacttatatttctttttaatcttttcagcctcagtaataaaattaatataaatgagtcaaattcttatctccttattctttgaagttaggattatatagagagagtaatgttgaatgagctataaaattggcataaagttactttttagttgggttacagtagttcatgttaactaatgctaaaaatgccttggtgatagaattctagttacatatagaattggatatagattgtaaaagcatgtttaatcagtatgtttctacgtgaaaagtaaataaaaggttctttttttggtaatacatctgtacacaacacatggg

SEQ ID NO: 176 - protein, 163 aa, Homosapiens
MGSSLGLCLGKAPSSSQLFLFFAMGSDVQPGTEMEIVVEETISVRDCLKLMLKKSGLQGDAWHLRKMDWCYEAGEPLCEEDATLKELLICSGDTLLLIEGQLPPLGFLKVPIWWYQLQGPSGHWESHQDQTNCTSSWGRVWRATSSQGENRMGFQQPVHHKEK

SEQ ID NO: 177 - DNA, 543 bp, Homosapiens
tattttctcttggcccagaagagcttggtttgtttgaagataaggataaacccgatgcaaaggttcgaatcatccctttacagttacagcgcttgtttgctcagcttctgctcttagaccaggaagctgcatccacagcagacctcactgacagctttgggtggaccagtaatgaggaaatgaggcaacatgatgtgcaggaactgaatcgaatcctcttcagcgctttggaaacttctttagttgggacctccggtcatgacctcatctatcgtctgtaccatggaaccattgttaaccagattgtttgtaaagaatgtaagaacgttagcgagaggcaggaagacttcttagatctaacagtagcagtcaaaaatgtatccggtttggaagatgctctctggaacatgtatgtagaagaggaagtttttgattgtgacaacttgtaccactgtggaacttgtgacaggctggttaaagcagcaaaggtaaagacagataactgctttttcccagggtccccactttgtagttagtacaagt

SEQ ID NO: 178 - protein, 118 aa, Homosapiens
MRQHDVQELNRILFSALETSLVGTSGHDLIYRLYHGTIVNQIVCKECKNVSERQEDFLDLTVAVKNVSGLEDALWNMYVEEEVFDCDNLYHCGTCDRLVKAAKVKTDNCFFPGSPLCS

SEQ ID NO: 179 - DNA, 351 bp, Homosapiens
tattttctcttggcccagaagagcttggtttgtttgaagataaggataaacccgatgcaaagaaagtgacttggcctataccctatgggtaatggaatttgccttccgagaaagaatcagttttccaagtacaatactgctactgctttataaacatgtaacactctttactatgcttattctttcttctggtgaaggaaatatttgcagaacatccacattagcttcccccagaagtctatttaaagcactttttttgcaacaataccgacctctccaccccacacaaaaaaaaatagaggctagtattctttcaatttggtactctggaaataaattgagtaatgagtt

SEQ ID NO: 180 - protein, 85 aa, Homosapiens
MEFAFRERISFPSTILLLLYKHVTLFTMLILSSGEGNICRTSTLASPRSLFKALFLQQYRPLHPTQKKIEASILSIWYSGNKLSN

SEQ ID NO: 181 - DNA, 426 bp, Homosapiens
cggggcatcctgggaagcatagtccacgatccataaatcactttctggagacccgccctcgccaacatggcggcgcccagttggggcgggttcgttcgcttcgcgttttggccagggcgggggtctgggctttaggcaggtagtatttagtttcacaatgtttggggacctgtttgaagaggagtattccactgtgtctaataatcagtatggaaaagggaagaaattaaagactaaagctttggagccacctgctcctagagaattcaccaatttaagcggaatcagaaatcagggtggaacctgttacctcaattcccttcttcagactcttcatttcacacctgaattcagagaagctctattttctcttggcccagaagagcttggtttgtttgaagataaggataaacccgatgcaaaggt

SEQ ID NO: 182 - protein, 88 aa, Homosapiens
MFGDLFEEEYSTVSNNQYGKGKKLKTKALEPPAPREFTNLSGIRNQGGTCYLNSLLQTLHFTPEFREALFSLGPEELGLFEDKDKPDA

SEQ ID NO: 183 - DNA, 2407 bp, Homosapiens
cttccgcctactgtatcatagcagcttagaatcccagctgctggctcgggctgcagttctctcatggctcgcacagggtggaccagccccattcccctatgtgtttctctgctgctgacctgtggctttgctgaggcagggaagctgctggtagtgcccatggatgggagtcactggttcaccatgcagtcggtggtggagaaacttatcctcagggggcatgaggtggttgtagtcatgccagaggtgagttggcaactgggaaaatcactgaattgcacagtgaagacttactcaacctcatacactctggaggatctggaccgggaattcatggatttcgccgatgctcaatggaaagcacaagtacgaagtttgttttctctatttctgagttcatccaatggtttttttaacttatttttttcgcattgcaggagtttgtttaatgaccgaaaattagtagaatacttaaaggagagttcttttgatgcggtgtttcttgatccttttgatgcctgtggcttaattgttgccaaatatttctccctcccctctgtggtcttcgccaggggaatagcttgccactatcttgaagaaggtgcacagtgccctgctcctctttcctatgtccccagaattctcttagggttctcagatgccatgactttcaaggagagagtacggaaccacatcatgcacttggaggaacatttattttgccagtatttttccaaaaatgccctagaaatagcctctgaaattctccaaacacctgtcacagcatatgatctctacagccacacatcaatttggttgttgcgaacagactttgttttggactatcccaaacccgtgatgcccaatatgatcttcattggtggtatcaactgccatcagggaaagccattgcctatggaatttgaagcctacattaatgcttctggagaacatggaattgtggttttctctttgggatcaatggtctcagaaattccagagaagaaagctatggcaattgctgatgctttgggcaaaatccctcagacagtcctgtggcggtacactggaacccgaccatcgaatcttgcgaacaacacgatacttgttaagtggctaccccaaaacgatctgcttggtcacccgatgacccgtgcctttatcacccatgctggttcccatggtgtttatgaaagcatatgcaatggcgttcccatggtgatgatgcccttgtttggtgatcagatggacaatgcaaagcgcatggagactaagggagctggagtgaccctgaatgttctggaaatgacttctgaagatttagaaaatgctctaaaagcagtcatcaatgacaaaagttacaaggagaacatcatgcgcctctccagccttcacaaggaccgcccggtggagccgctggacctggccgtgttctgggtggagtttgtgatgaggcacaagggcgcgccacacctgcgccccgcagcccacgacctcacctggtaccagtaccattccttggacgtgattggtttcctcttggccgtcgtgctgacagtggccttcatcacctttaaatgttgtgcttatggctaccggaaatgcttggggaaaaaagggcgagttaagaaagcccacaaatccaagacccattgagaagtgggtgggaaataaggtaaaattttgaaccattccctagtcatttccaaacttgaaaacagaatcagtgttaaattcattttattcttattaaggaaatactttgcataaattaatcagccccagagtgctttaaaaaattctcttaaataaaaataatagactcgctagtcagtaaagatatttgaatatgtatcgtgccccctctggtgtctttgatcaggatgacatgtgccatttttcagaggacgtgcagacaggctggcattctagattacttttcttactctgaaacatggcctgtttgggagtgcgggattcaaaggtggtcccacggctgcccctactgcaaatggcagttttaatcttatcttttggcttctgcagatggttgcaattgatccttaaccaataatggtcagtcctcatctctgtcgtgcttcataggtgccaccttgtgtgtttaaagaagggaagctttgtacctttagagtgtaggtgaaatgaatgaatggcttggagtgcactgagaacagcatatgatttcttgctttggggaaaaagaatgatgctatgaaattggtgggtggtgtatttgagaagataatcattgcttatgtcaaatggagctgaatttgataaaaacccaaaatacagctatgaagtgctgggcaagtttactttttttctgatgtttcctacaactaaaaataaattaataaatttatataaattctatttaagtgtt

SEQ ID NO: 184 - protein, 530 aa, Homosapiens; identical to SEQ ID NO: 28

SEQ ID NO: 185 - DNA, 2413 bp, Homosapiens
gtacttcttccgcctactgtatcatagcagcttagaatcccagctgctggctcgggctgcagttctctcatggctcgcgcagggtggaccagccccgttcctttatgtgtgtgtctactgctgacctgtggctttgccgaggcagggaagctgctggtagtgcccatggatgggagtcactggttcaccatgcagtcggtggtggagaaacttatcctcagggggcatgaggtggttgtagtcatgccagaggtgagttggcaactggaaagatcactgaattgcacagtgaagacttactcaacctcgtacactctggaagatcagaaccgggaattcatggttttcgcccatgctcaatggaaagcacaggcacaaagtatattttctctattaatgagttcatccagtggttttcttgacttatttttttcgcattgcaggagtttgtttaatgaccgaaaattagtagaatacttaaaggagagttcttttgatgcagtgtttctggatccttttgatacctgtggcttaattgttgctaaatatttctccctcccctctgtggtcttcaccaggggaatattttgccaccatcttgaagaaggtgcacagtgccctgctcctctttcctatgtccccaatgatctcttagggttctcagatgccatgactttcaaggagagagtatggaaccacatcgtgcacttggaggaccatttattttgccagtatctttttagaaatgccctagaaatagcctctgaaattctccaaacccctgtcacggcatatgatctctacagtcacacatcaatttggttgttgcgaacggactttgttttggactatcccaaacccgtgatgcccaacatgatcttcattggtggtatcaactgtcatcagggaaagccattgcctatggaatttgaagcctacattaatgcttctggagaacatggaattgtggttttctctttgggatcaatggtctcagaaattccagagaagaaagctatggcaattgctgatgctttgggcaaaatccctcagacagtcctgtggcggtacactggaacccgaccatcgaatcttgcgaacaacacgatacttgttaagtggctaccccaaaacgatctgcttggtcacccgatgacccgtgcctttatcacccatgctggttcccatggtgtttatgaaagcatatgcaatggcgttcccatggtgatgatgcccttgtttggtgatcagatggacaatgcaaagcgcatggagactaagggagctggagtgaccctgaatgttctggaaatgacttctgaagatttagaaaatgctctaaaagcagtcatcaatgacaaaagttacaaggagaacatcatgcgcctctccagccttcacaaggaccgcccggtggagccgctggacctggccgtgttctgggtggagtttgtgatgaggcacaagggcgcgccacacctgcgccccgcagcccacgacctcacctggtaccagtaccattccttggacgtgattggtttcctcttggccgtcgtgctgacagtggccttcatcacctttaaatgttgtgcttatggctaccggaaatgcttggggaaaaaagggcgagttaagaaagcccacaaatccaagacccattgagaagtgggtgggaaataaggtaaaattttgaaccattccctagtcatttccaaacttgaaaacagaatcagtgttaaattcattttattcttattaaggaaatactttgcataaattaatcagccccagagtgctttaaaaaattctcttaaataaaaataatagactcgctagtcagtaaagatatttgaatatgtatcgtgccccctctggtgtctttgatcaggatgacatgtgccatttttcagaggacgtgcagacaggctggcattctagattacttttcttactctgaaacatggcctgtttgggagtgcgggattcaaaggtggtcccacggctgcccctactgcaaatggcagttttaatcttatcttttggcttctgcagatggttgcaattgatccttaaccaataatggtcagtcctcatctctgtcgtgcttcataggtgccaccttgtgtgtttaaagaagggaagctttgtacctttagagtgtaggtgaaatgaatgaatggcttggagtgcactgagaacagcatatgatttcttgctttggggaaaaagaatgatgctatgaaattggtgggtggtgtatttgagaagataatcattgcttatgtcaaatggagctgaatttgataaaaacccaaaatacagctatgaagtgctgggcaagtttactttttttctgatgtttcctacaactaaaaataaattaataaatttatataaattctatttaagtgtt

SEQ ID NO: 186 - protein, 530 aa, Homosapiens; identical to SEQ ID NO: 30

SEQ ID NO: 187 - DNA, 2086 bp, Homosapiens
atcatagcagcttagaatcccagctgctggctcgggctgcagttctctcatggctcgcgcagggtggaccagccccgttcctttatgtgtgtgtctactgctgacctgtggctttgccgaggcagggaagctgctggtagtgcccatggatgggagtcactggttcaccatgcagtcggtggtggagaaacttatcctcagggggcatgaggtggttgtagtcatgccagaggtgagttggcaactggaaagatcactgaattgcacagtgaagacttactcaacctcgtacactctggaagatcagaaccgggaattcatggttttcgcccatgctcaatggaaagcacaggcacaaagtatattttctctattaatgagttcatccagtggttttcttgacttatttttttcgcattgcaggagtttgtttaatgaccgaaaattagtagaatacttaaaggagagttcttttgatgcagtgtttctggatccttttgatacctgtggcttaattgttgctaaatatttctccctcccctctgtggtcttcaccaggggaatattttgccaccatcttgaagaaggtgcacagtgccctgctcctctttcctatgtccccaatgatctcttagggttctcagatgccatgactttcaaggagagagtatggaaccacatcgtgcacttggaggaccatttattttgccagtatctttttagaaatgccctagaaatagcctctgaaattctccaaacccctgtcacggcatatgatctctacagtcacacatcaatttggttgttgcgaacggactttgttttggactatcccaaacccgtgatgcccaacatgatcttcattggtggtatcaactgtcatcagggaaagccattgcctatggaatttgaagcctacattaatgcttctggagaacatggaattgtggttttctctttgggatcaatggtctcagaaattccagagaagaaagctatggcaattgctgatgctttgggcaaaatccctcagacagtcctgtggcggtacactggaacccgaccatcgaatcttgcgaacaacacgatacttgttaagtggctaccccaaaacgatctgcttggtcacccgatgacccgtgcctttatcacccatgctggttcccatggtgtttatgaaagcatatgcaatggcgttcccatggtgatgatgcccttgtttggtgatcagatggacaatgcaaagcgcatggagactaagggagctggagtgaccctgaatgttctggaaatgacttctgaagatttagaaaatgctctaaaagcagtcatcaatgacaaaagaaagaagcagcagtcaggaagacagatgtgaagagctggagcatgttcagatgagaggagacggaacacggggacacaccagcttgagcaagggacaacaggggaggactgatgactgacttcccacctttgaggtgctaatgtgtgtgtggtggcactggataaaagatcaatgttggctaggcaccatggcacacgcctgtagtcccagccactctggaggctaaggcgggaggattgcttgagcccagaagttggaggctgctatgagccgtgatcatgccactgcactccagcaacctgggcaacagagtgagaccctgtctcaaaaaaaaaaaaaaaaatgaaaagtccacataacctgagcatcatgtgcccagagcgttgggtggtgtggtcccattccttccttccagcggcttcttctggccacctcaatgtcaggatgtcctgctcacatatcaataccattaaaacctgacttctttccctgcactgttgaagctccttcttgaggctcacattatggatataattttgattctttcttcagtggtatagataactacttgtaacctaagaacaacttggtgaaagtcctctaatacattattttttaaaaaaacacaaatcaatgagctcaacttattaactaactttcatctattcatttttgagccatccctgtctgattgtgaatctccatgattccaacactctgagctggggatagtgcctacac

SEQ ID NO: 188 - protein, 441 aa, Homosapiens
MARAGWTSPVPLCVCLLLTCGFAEAGKLLVVPMDGSHWFTMQSVVEKLILRGHEVVVVMPEVSWQLERSLNCTVKTYSTSYTLEDQNREFMVFAHAQWKAQAQSIFSLLMSSSSGFLDLFFSHCRSLFNDRKLVEYLKESSFDAVFLDPFDTCGLIVAKYFSLPSVVFTRGIFCHHLEEGAQCPAPLSYVPNDLLGFSDAMTFKERVWNHIVHLEDHLFCQYLFRNALEIASEILQTPVTAYDLYSHTSIWLLRTDFVLDYPKPVMPNMIFIGGINCHQGKPLPMEFEAYINASGEHGIVVFSLGSMVSEIPEKKAMAIADALGKIPQTVLWRYTGTRPSNLANNTILVKWLPQNDLLGHPMTRAFITHAGSHGVYESICNGVPMVMMPLFGDQMDNAKRMETKGAGVTLNVLEMTSEDLENALKAVINDKRKKQQSGRQM

SEQ ID NO: 189 - DNA, 2426 bp, Homosapiens
ggttttgtgctggtatttctcccacctactgtatcataggagcttagattcccagctgcttgctctcagctgcagttctctgatggcttgcacagggtggaccagcccccttcctctatgtgtgtgtctgctgctgacctgtggctttgccgaggcagggaagctactggtagtgcccatggatgggagccactggttcaccatgaggtcggtggtggagaaactcattctcagggggcatgaggtggttgtagtcatgccagaggtgagttggcaactgggaagatcactgaattgcacagtgaagacttattcaacttcatataccctggaggatctggaccgggagttcaaggcttttgcccatgctcaatggaaagcacaagtacgaagtatatattctctattaatgggttcatacaatgacatttttgacttatttttttcaaattgcaggagtttgtttaaagacaaaaaattagtagaatacttaaaggagagttcttttgatgcagtgtttctcgatccttttgataactgtggcttaattgttgccaaatatttctccctcccctccgtggtcttcgccaggggaatactttgccactatcttgaagaaggtgcacagtgccctgctcctctttcctatgtccccagaattctcttagggttctcagatgccatgactttcaaggagagagtacggaaccacatcatgcacttggaggaacatttattatgccaccgttttttcaaaaatgccctagaaatagcctctgaaattctccaaacacctgttacggagtatgatctctacagccacacatcaatttggttgttgcgaacggactttgttttggactatcccaaacccgtgatgcccaacatgatcttcattggtggtatcaactgccatcagggaaagccgttgcctatggaatttgaagcctacattaatgcttctggagaacatggaattgtggttttctctttgggatcaatggtctcagaaattccagagaagaaagctatggcaattgctgatgctttgggcaaaatccctcagacagtcctgtggcggtacactggaacccgaccatcgaatcttgcgaacaacacgatacttgttaagtggctaccccaaaacgatctgcttggtcacccgatgacccgtgcctttatcacccatgctggttcccatggtgtttatgaaagcatatgcaatggcgttcccatggtgatgatgcccttgtttggtgatcagatggacaatgcaaagcgcatggagactaagggagctggagtgaccctgaatgttctggaaatgacttctgaagatttagaaaatgctctaaaagcagtcatcaatgacaaaagttacaaggagaacatcatgcgcctctccagccttcacaaggaccgcccggtggagccgctggacctggccgtgttctgggtggagtttgtgatgaggcacaagggcgcgccacacctgcgccccgcagcccacgacctcacctggtaccagtaccattccttggacgtgattggtttcctcttggccgtcgtgctgacagtggccttcatcacctttaaatgttgtgcttatggctaccggaaatgcttggggaaaaaagggcgagttaagaaagcccacaaatccaagacccattgagaagtgggtgggaaataaggtaaaattttgaaccattccctagtcatttccaaacttgaaaacagaatcagtgttaaattcattttattcttattaaggaaatactttgcataaattaatcagccccagagtgctttaaaaaattctcttaaataaaaataatagactcgctagtcagtaaagatatttgaatatgtatcgtgccccctctggtgtctttgatcaggatgacatgtgccatttttcagaggacgtgcagacaggctggcattctagattacttttcttactctgaaacatggcctgtttgggagtgcgggattcaaaggtggtcccacggctgcccctactgcaaatggcagttttaatcttatcttttggcttctgcagatggttgcaattgatccttaaccaataatggtcagtcctcatctctgtcgtgcttcataggtgccaccttgtgtgtttaaagaagggaagctttgtacctttagagtgtaggtgaaatgaatgaatggcttggagtgcactgagaacagcatatgatttcttgctttggggaaaaagaatgatgctatgaaattggtgggtggtgtatttgagaagataatcattgcttatgtcaaatggagctgaatttgataaaaacccaaaatacagctatgaagtgctgggcaagtttactttttttctgatgtttcctacaactaaaaataaattaataaatttatataaattctatttaagtgtt

SEQ ID NO: 190 - protein, 530 aa, Homosapiens; identical to SEQ ID NO: 32

SEQ ID NO: 191 - DNA, 2344 bp, Homosapiens
atggctcgtgcagggtggactggcctccttcccctatatgtgtgtctactgctgacctgtggctttgccaaggcagggaagctgctggtagtgcccatggatgggagccactggttcaccatgcagtcggtggtggagaaactcatcctcagggggcatgaggtggtcgtagtcatgccagaggtgagttggcaactgggaagatcactgaattgcacagtgaagacttactcaacctcatacactctggaggatcaggaccgggagttcatggtttttgccgatgctcgctggacggcaccattgcgaagtgcattttctctattaacaagttcatccaatggtatttttgacttatttttttcaaattgcaggagtttgtttaatgaccgaaaattagtagaatacttaaaggagagttgttttgatgcagtgtttctcgatccttttgatgcctgtggcttaattgttgccaaatatttctccctcccctctgtggtcttcgccaggggaatattttgccactatcttgaagaaggtgcacagtgccctgctcctctttcctatgtccccagacttctcttagggttctcagacgccatgactttcaaggagagagtatggaaccacatcatgcacttggaggaacatttattttgcccctattttttcaaaaatgtcttagaaatagcctctgaaattctccaaacccctgtcacggcatatgatctctacagccacacatcaatttggttgttgcgaactgactttgttttggagtatcccaaacccgtgatgcccaatatgatcttcattggtggtatcaactgtcatcagggaaagccagtgcctatggaatttgaagcctacattaatgcttctggagaacatggaattgtggttttctctttgggatcaatggtctcagaaattccagagaagaaagctatggcaattgctgatgctttgggcaaaatccctcagacagtcctgtggcggtacactggaacccgaccatcgaatcttgcgaacaacacgatacttgttaagtggctaccccaaaacgatctgcttggtcacccgatgacccgtgcctttatcacccatgctggttcccatggtgtttatgaaagcatatgcaatggcgttcccatggtgatgatgcccttgtttggtgatcagatggacaatgcaaagcgcatggagactaagggagctggagtgaccctgaatgttctggaaatgacttctgaagatttagaaaatgctctaaaagcagtcatcaatgacaaaagttacaaggagaacatcatgcgcctctccagccttcacaaggaccgcccggtggagccgctggacctggccgtgttctgggtggagtttgtgatgaggcacaagggcgcgccacacctgcgccccgcagcccacgacctcacctggtaccagtaccattccttggacgtgattggtttcctcttggccgtcgtgctgacagtggccttcatcacctttaaatgttgtgcttatggctaccggaaatgcttggggaaaaaagggcgagttaagaaagcccacaaatccaagacccattgagaagtgggtgggaaataaggtaaaattttgaaccattccctagtcatttccaaacttgaaaacagaatcagtgttaaattcattttattcttattaaggaaatactttgcataaattaatcagccccagagtgctttaaaaaattctcttaaataaaaataatagactcgctagtcagtaaagatatttgaatatgtatcgtgccccctctggtgtctttgatcaggatgacatgtgccatttttcagaggacgtgcagacaggctggcattctagattacttttcttactctgaaacatggcctgtttgggagtgcgggattcaaaggtggtcccacggctgcccctactgcaaatggcagttttaatcttatcttttggcttctgcagatggttgcaattgatccttaaccaataatggtcagtcctcatctctgtcgtgcttcataggtgccaccttgtgtgtttaaagaagggaagctttgtacctttagagtgtaggtgaaatgaatgaatggcttggagtgcactgagaacagcatatgatttcttgctttggggaaaaagaatgatgctatgaaattggtgggtggtgtatttgagaagataatcattgcttatgtcaaatggagctgaatttgataaaaacccaaaatacagctatgaagtgctgggcaagtttactttttttctgatgtttcctacaactaaaaataaattaataaatttatataaattctatttaagtgtt

SEQ ID NO: 192 - protein, 530 aa, Homosapiens; identical to SEQ ID NO: 34

SEQ ID NO: 193 - DNA, 2256 bp, Homosapiens
cagtgtttctcgatccttttgatgcctgtggcttaattgttgccaaatatttctccctcccctctgtggtcttcgccaggggaatattttgccactatcttgaagaaggtgcacagtgccctgctcctctttcctatgtccccagacttctcttagggttctcagacgccatgactttcaaggagagagtatggaaccacatcatgcacttggaggaacatttattttgcccctattttttcaaaaatgtcttagaaatagcctctgaaattctccaaacccctgtcacggcatatgatctctacagccacacatcaatttggttgttgcgaactgactttgttttggagtatcccaaacccgtgatgcccaatatgatcttcattggtggtatcaactgtcatcagggaaagccagtgcctatggtaagatctacttctttcaccccactggaatatgtcccaagcctgagtcattcagcctgcagcaatccctgagaaaaaaaaaaaatcggcctttgcctggacactcaagtgatacctgaggacaccttgactcctacagcaccaaccagggcaggcctgggtctccagcggagctactctttagggatcgtcattatgacgaacagacatgccagattcctctggctagtgtccagtgcagacatacacacacacacacatacacacacacacacacacacacaccattcttagtacagtcaaagctcacaggagaaagaaaaatgttttctaataccttcttaatttgcaagaaggtgttaggaattcaagggatggtatgcatagtgatgttagtttcatttcttcagctccttcctccaactcatgttctgtagggacttctgggactaagaacaggacccacatatgagcaacaggattttcagagcaaggctgtggttggaagggctcagaccaacgtccacagcagagtggaggtctagtataaagaatgtgaagtttgtagcatctcttgatcccgctattcctacatgcttgcttaagccattcttcctctagatgaactgttctttgaaggaaacctgcctaatgtctgcctgctcaagaaggtggacctgagctctgttccctttgcaaccttcctggagtcttattgctatctagatgaactcaaagcaagatgctgccgcccccatgactttgatcattgtaagctgccaatcctcttgggaggctgctcccagcttggactgagctgagtcttcgcatgccttgaacaatgaatttgcatcctggttatgttccccatgggggccagccctgtccttggagtggcccctctaatcatgttgctcaggcttcttctcccttcctgggccccagaacacctccggtgccaaacttgtgggtgggaacaggaactcgcgtgccagccaggtgtgcatgactagctctgggcaagtctgttctagtaattcaaggtaccacctctcactgggacagcctagtttctacacaggtcttgctctgggaccgccctcagcagtgtggttagcaggcagggccagtgtgaccctccctttctgggcctcagttgagaaacctgaagctcaggagaggagtcactcccctggcagatgggtggctgggccagaagcagataccaggctttctgactcctgctctaggattctcaccacgtactggctagacttatacttctcaaatcttaatttcctaaaggcaagtaacagtttgaatgttgttatattgtgatgtataataagaaatatatgtttgtctttgtttcctggacacagctcctgaaaccataagtggtgggagcgataaacgtgaacaaagaatcttttgttattcaaaacagatccctttcgatcacacctaagtttatgtaaaggagatgtaaagtctctaaggatgagggctagttgccagggaacaaaacccttgcgattagagggaagaaaggagagagagattgaagattgatttgatcaccgatgggcaacaatctaatcaatcatgcctactatgtatggaagcctacataaaaactcagaagggcagggttcagagagctttcaggttgctgaaggtgtggagggtggggcacccagagatggcagatggggctccatggccatacccccatatcttgttctttgtactttttcctctggctattcatccgtattgtttgcaatatcctttgtaataaaccaaacctagtaaataaactgttttcttc

SEQ ID NO: 194 - protein, 108 aa, Homosapiens
MTFKERVWNHIMHLEEHLFCPYFFKNVLEIASEILQTPVTAYDLYSHTSIWLLRTDFVLEYPKPVMPNMIFIGGINCHQGKPVPMVRSTSFTPLEYVPSLSHSACSNP

SEQ ID NO: 195 - DNA, 1463 bp, Homosapiens
gggaccgccctcagcagtgtggttagcaggcagggccagtgtgaccctccctttctgggcctcagttgagaaacctgaagctcaggagaggagtcactcccctggcagatgggtggctgggccagaagcagataccaggctttctgactcctgctctaggattctcaccacgtactggctagacttatacttctcaaatcttaatttcctaaaggccggtcatgcccaacatggtcttcattggaggtatcaactgtaagaagaggaaagacttgtctcaggaatttgaagcctacattaatgcttctggagaacatggaattgtggttttctctttgggatcaatggtctcagaaattccagagaagaaagctatggcaattgctgatgctttgggcaaaatccctcagacagtcctgtggcggtacactggaacccgaccatcgaatcttgcgaacaacacgatacttgttaagtggctaccccaaaacgatctgcttggtcacccgatgacccgtgcctttatcacccatgctggttcccatggtgtttatgaaagcatatgcaatggcgttcccatggtgatgatgcccttgtttggtgatcagatggacaatgcaaagcgcatggagactaagggagctggagtgaccctgaatgttctggaaatgacttctgaagatttagaaaatgctctaaaagcagtcatcaatgacaaaagaaagaagcagcagtcaggaagacagatgtgaagagctggagcatgttcagatgagaggagacggaacacggggacacaccagcttgagcaagggacaacaggggaggactgatgactgacttcccacctttgaggtgctaatgtgtgtgtggtggcactggataaaagatcaatgttggctaggcaccatggcacacgcctgtagtcccagccactctggaggctaaggcgggaggattgcttgagcccagaagttggaggctgctatgagccgtgatcatgccactgcactccagcaacctgggcaacagagtgagaccctgtctcaaaaaaaaaaaaaaaaatgaaaagtccacataacctgagcatcatgtgcccagagcgttgggtggtgtggtcccattccttccttccagcggcttcttctggccacctcaatgtcaggatgtcctgctcacatatcaataccattaaaacctgacttctttccctgcactgttgaagctccttcttgaggctcacattatggatataattttgattctttcttcagtggtatagataactacttgtaacctaagaacaacttggtgaaagtcctctaatacattattttttaaaaaaacacaaatcaatgagctcaacttattaactaactttcatctattcatttttgagccatccctgtctgattgtgaatctccatgattccaacactctgagctggggatagtgcctacac

SEQ ID NO: 196 - protein, 176 aa, Homosapiens
MPNMVFIGGINCKKRKDLSQEFEAYINASGEHGIVVFSLGSMVSEIPEKKAMAIADALGKIPQTVLWRYTGTRPSNLANNTILVKWLPQNDLLGHPMTRAFITHAGSHGVYESICNGVPMVMMPLFGDQMDNAKRMETKGAGVTLNVLEMTSEDLENALKAVINDKRKKQQSGRQM

SEQ ID NO: 197 - DNA, 1770 bp, Homosapiens
gggaccgccctcagcagtgtggttagcaggcagggccagtgtgaccctccctttctgggcctcagttgagaaacctgaagctcaggagaggagtcactcccctggcagatgggtggctgggccagaagcagataccaggctttctgactcctgctctaggattctcaccacgtactggctagacttatacttctcaaatcttaatttcctaaaggccggtcatgcccaacatggtcttcattggaggtatcaactgtaagaagaggaaagacttgtctcaggaatttgaagcctacattaatgcttctggagaacatggaattgtggttttctctttgggatcaatggtctcagaaattccagagaagaaagctatggcaattgctgatgctttgggcaaaatccctcagacagtcctgtggcggtacactggaacccgaccatcgaatcttgcgaacaacacgatacttgttaagtggctaccccaaaacgatctgcttggtcacccgatgacccgtgcctttatcacccatgctggttcccatggtgtttatgaaagcatatgcaatggcgttcccatggtgatgatgcccttgtttggtgatcagatggacaatgcaaagcgcatggagactaagggagctggagtgaccctgaatgttctggaaatgacttctgaagatttagaaaatgctctaaaagcagtcatcaatgacaaaagttacaaggagaacatcatgcgcctctccagccttcacaaggaccgcccggtggagccgctggacctggccgtgttctgggtggagtttgtgatgaggcacaagggcgcgccacacctgcgccccgcagcccacgacctcacctggtaccagtaccattccttggacgtgattggtttcctcttggccgtcgtgctgacagtggccttcatcacctttaaatgttgtgcttatggctaccggaaatgcttggggaaaaaagggcgagttaagaaagcccacaaatccaagacccattgagaagtgggtgggaaataaggtaaaattttgaaccattccctagtcatttccaaacttgaaaacagaatcagtgttaaattcattttattcttattaaggaaatactttgcataaattaatcagccccagagtgctttaaaaaattctcttaaataaaaataatagactcgctagtcagtaaagatatttgaatatgtatcgtgccccctctggtgtctttgatcaggatgacatgtgccatttttcagaggacgtgcagacaggctggcattctagattacttttcttactctgaaacatggcctgtttgggagtgcgggattcaaaggtggtcccacggctgcccctactgcaaatggcagttttaatcttatcttttggcttctgcagatggttgcaattgatccttaaccaataatggtcagtcctcatctctgtcgtgcttcataggtgccaccttgtgtgtttaaagaagggaagctttgtacctttagagtgtaggtgaaatgaatgaatggcttggagtgcactgagaacagcatatgatttcttgctttggggaaaaagaatgatgctatgaaattggtgggtggtgtatttgagaagataatcattgcttatgtcaaatggagctgaatttgataaaaacccaaaatacagctatgaagtgctgggcaagtttactttttttctgatgtttcctacaactaaaaataaattaataaatttatataaattctatttaagtgtt

SEQ ID NO: 198 - protein, 265 aa, Homosapiens; identical to SEQ ID NO: 38

SEQ ID NO: 199 - DNA, 1871 bp, Homosapiens
actcccctggcagatgggtggctgggccagaagcagataccaggctttctgactcctgctctaggattctcaccacgtactggctagacttatacttctcaaatcttaatttcctaaaggccggtcatgcccaacatggtcttcattggaggtatcaactgtaagaagaggaaagacttgtctcagtggaagtcgacatggacttgaagctgcctgtcccatcactaccgtaggacatgcagaaggaagaaaggcccccacttcccagggagccaaaggaacgaaatcctgtatcaaaagaagaaaaaccaccctcaaaagctggaaattcactgaaggcagagaaaaggggtgcagaccctctgcttctgcttcccagggagttcctctgaccccccaaaatattctccagcgggtttcccaagaggtcaaaggagaatgggtcccggccgccaaagaactccctgaagacctcggcggggtcacggaagctgaagacctactcgaaggggtccttgaagggcctgccgcctgcgcagccgccctccgccctcgcctcgccatagcggtcatagatatcgcgtttctacgcgtccgacaacacctcgtaggcctcagccacctgcttgaatcttctcaccgcttcctccctgtcctcggggtttttgtcggggtgccacttgagcgccagcttgcggtacgccttcttgataccctcggacgaggcctaccggggtactcccagcacctcgtagtagtccactatgctggactgccaaagagcctgcggggcactggcacagcgagcggcaaggctgccagcacccgcgcacaggtcagaggcttggcgacctgggccgcctggagggccgccccttatgacgcagccacatctcattggccgaggcctgtgagcgcctcgcatcccaagatgcagtgctcctgggactggccctgctctctgtgaggctctgtgaggccctgtgatgctccaagaccaggccccgcccactccggcctccaaccagccatggtctccaaaaaggatgggaaaaagaggttggggaaaagagagggccttgactttggctgcctgaagaactgtttttcttaaagtaggctttatatcagtctttttcctcggccacaggagggaagagggtggtgggagtgagtttagtctgaccggggctgaagacatcctgttgtttaggactgcggttctccaacgttccagccccggtgcccatttgcttttgttcatctggattatgcctatcatatgtactgcattagagattaaaacagaattaaaaagacatattcattgggcaatttaagaagaataaacccatgacacactaacaaacctttttatgtaactttttttgagacaaaatgtagtgagaagagtggcatcgttttacagtttttgcatctctctctttagtacttggctctatagagaggtggattctcatgtcagcttctgcattctatctattgtgatattacacatcccccatgtagcttctggaaaactccactgtacacttgtgggagaatgacaatgagaaaatcaagtaacattattacggaaatagttttgactttgtaaaattctcctgaaaaattactggggatccctaggatttcctggctcatactttgagaatcgctagtctagcagagtagtccctggtattctgaagggattagtttaggacaaccctccttccccataccaaaatctagatgctcaagctccttttataaaatgacacagtatttgtatataacctacccatatcctcctttaaacctctagtcatctcttgattacttttacctaataaatgtaaatgctatgt

SEQ ID NO: 200 - protein, 51 aa, Homosapiens [sequence omitted]

SEQ ID NO: 201 - DNA, 1226 bp, Homosapiens
actggaaccttgaactcctgggctcaaataatcctcccacctcagccttccgagtagttaggtctacaggcacacgctaccatgtccagctaggtttttactttctgtagtgaaggaatctcactatgctgcctaggctggtctcaaactcctgggctcaagctatcctcctgcttcggccccgcaaagtgctgggattataagcatgagccaccacgctcagccagttgcatcaattctattaaatgcagaagttgatacctccaatgaagaccatgttgggcatgaccggcctaggatattcaagcacaaagtcatatcttaacagccaaacagagaccttctgatataaggtgattatatccacatctctcttgaggacagctgatgcgagttcttcatactttgaaaacagacaataaaatagatagggctccaacaaattaacaaggaagttggccactcgttgggaaaaagtcatgtggtctgaaaactttgtgtagcacctgggaatgtaggacacagggtctgggcttctgctgaatgtatgctccagggaacacggaaaacccctgaagaggtacacagatggtaggcccaaatactcagccaggatcaccccacagggtaaggctgggtctgtgaaaagagcatcaaacttgctctccttaaagaagttcagggtgtccctgtcctgcaggaggctctggcagttgatgaagtacaggccaataacaatcatgttattcctgtactctgtctgaggagcagttaggaatgatcgctcagcaaagtgattgtttccaaatgattggtaacggttcttcagctcttcttggtcatacggcactggatagatttttcttgtgtagtatttggattctttcaaaagcaaattaacttcaggcaccaccactacaatctcatgaccccggtcactgagaacctcaactatatccttcatactaagccagtggcttccgtcctgagggaccaccagcagcttgtcacctacaaccatgccccaaagtgctaagaagaaaacccctgcagaaattctctgaaatgagcgaaggaggcaggccatcctggaaagagttaaagtaacaacggtaataaagagttttcactctccaaatcacagggctcctaggtattttccctaaactaaccactgcttttcacaggtcctgtctacctctcccttgctctgaattttacccttt

SEQ ID NO: 202 - protein, 39 aa, Homosapiens
MSHHAQPVASILLNAEVDTSNEDHVGHDRPRIFKHKVIS

SEQ ID NO: 203 - DNA, 2489 bp, Homosapiens
aaagggtaaaattcagagcaagggagaggtagacaggacctgtgaaaagcagtggttagtttagggaaaatacctaggagccctgtgatttggagagtgaaaactctttattaccgttgttactttaactctttccaggatggcctgcctccttcgctcatttcagagaatttctgcaggggttttcttcttagcactttggggcatggttgtaggtgacaagctgctggtggtccctcaggacggaagccactggcttagtatgaaggatatagttgaggttctcagtgaccggggtcatgagattgtagtggtggtgcctgaagttaatttgcttttgaaagaatccaaatactacacaagaaaaatctatccagtgccgtatgaccaagaagagctgaagaaccgttaccaatcatttggaaacaatcactttgctgagcgatcattcctaactgctcctcagacagagtacaggaataacatgattgttattggcctgtacttcatcaactgccagagcctcctgcaggacagggacaccctgaacttctttaaggagagcaagtttgatgctcttttcacagacccagccttaccctgtggggtgatcctggctgagtatttgggcctaccatctgtgtacctcttcaggggttttccgtgttccctggagcatacattcagcagaagcccagaccctgtgtcctacattcccaggtgctacacaaagttttcagaccacatgactttttcccaacgagtggccaacttccttgttaatttgttggagccctatctattttattgtctgttttcaaagtatgaagaactcgcatcagctgtcctcaagagagatgtggatataatcaccttatatcagaaggtctctgtttggctgttaagatatgactttgtgcttgaatatcctaggccggtcatgcccaacatggtcttcattggaggtatcaactgtaagaagaggaaagacttgtctcaggaatttgaagcctacattaatgcttctggagaacatggaattgtggttttctctttgggatcaatggtctcagaaattccagagaagaaagctatggcaattgctgatgctttgggcaaaatccctcagacagtcctgtggcggtacactggaacccgaccatcgaatcttgcgaacaacacgatacttgttaagtggctaccccaaaacgatctgcttggtcacccgatgacccgtgcctttatcacccatgctggttcccatggtgtttatgaaagcatatgcaatggcgttcccatggtgatgatgcccttgtttggtgatcagatggacaatgcaaagcgcatggagactaagggagctggagtgaccctgaatgttctggaaatgacttctgaagatttagaaaatgctctaaaagcagtcatcaatgacaaaagttacaaggagaacatcatgcgcctctccagccttcacaaggaccgcccggtggagccgctggacctggccgtgttctgggtggagtttgtgatgaggcacaagggcgcgccacacctgcgccccgcagcccacgacctcacctggtaccagtaccattccttggacgtgattggtttcctcttggccgtcgtgctgacagtggccttcatcacctttaaatgttgtgcttatggctaccggaaatgcttggggaaaaaagggcgagttaagaaagcccacaaatccaagacccattgagaagtgggtgggaaataaggtaaaattttgaaccattccctagtcatttccaaacttgaaaacagaatcagtgttaaattcattttattcttattaaggaaatactttgcataaattaatcagccccagagtgctttaaaaaattctcttaaataaaaataatagactcgctagtcagtaaagatatttgaatatgtatcgtgccccctctggtgtctttgatcaggatgacatgtgccatttttcagaggacgtgcagacaggctggcattctagattacttttcttactctgaaacatggcctgtttgggagtgcgggattcaaaggtggtcccacggctgcccctactgcaaatggcagttttaatcttatcttttggcttctgcagatggttgcaattgatccttaaccaataatggtcagtcctcatctctgtcgtgcttcataggtgccaccttgtgtgtttaaagaagggaagctttgtacctttagagtgtaggtgaaatgaatgaatggcttggagtgcactgagaacagcatatgatttcttgctttggggaaaaagaatgatgctatgaaattggtgggtggtgtatttgagaagataatcattgcttatgtcaaatggagctgaatttgataaaaacccaaaatacagctatgaagtgctgggcaagtttactttttttctgatgtttcctacaactaaaaataaattaataaatttatataaattctatttaagtgtt

SEQ ID NO: 204 - protein, 532 aa, Homosapiens; identical to SEQ ID NO: 36

SEQ ID NO: 205 - DNA, 1440 bp, Homosapiens
gggagaggtagacaggacctgtgaaaagcagtggttagtttagggaaaatacctaggagccctgtgatttggagagtgaaaactctttattaccgttgttactttaactctttccaggatggcctgcctccttcgctcatttcagagaatttctgcaggggttttcttcttagcactttggggcatggttgtaggtgacaagctgctggtggtccctcaggacggaagccactggcttagtatgaaggatatagttgaggttctcagtgaccggggtcatgagattgtagtggtggtgcctgaagttaatttgcttttgaaagaatccaaatactacacaagaaaaatctatccagtgccgtatgaccaagaagagctgaagaaccgttaccaatcatttggaaacaatcactttgctgagcgatcattcctaactgctcctcagacagagtacaggaataacatgattgttattggcctgtacttcatcaactgccagagcctcctgcaggacagggacaccctgaacttctttaaggagagcaagtttgatgctcttttcacagacccagccttaccctgtggggtgatcctggctgagtatttgggcctaccatctgtgtacctcttcaggggttttccgtgttccctggagcatacattcagcagaagcccagaccctgtgtcctacattcccaggtgctacacaaagttttcagaccacatgactttttcccaacgagtggccaacttccttgttaatttgttggagccctatctattttattgtctgttttcaaagtatgaagaactcgcatcagctgtcctcaagagagatgtggatataatcaccttatatcagaaggtctctgtttggctgttaagatatgactttgtgcttgaatatcctaggccggtcatgcccaacatggtcttcattggaggtatcaactgtaagaagaggaaagacttgtctcaggtcttgtgtggagctactacataatgaggccctgatcaggcacctgaatgctacttcctttgatgtggttttaacagaccccgttaacctctgcgcggcagtgctggctaagtacctgtcgattcctactgtgttttttttgaggaacattccatgtgatttagactttaagggcacacagtgtccaaacccttcctcctatattcctagattactaacaaccaattcagaccacatgacattcatgcaaagggtcaagaacatgctctaccctctggccctgtcctacatttgccatgctttttctgctccttatgcaagccttgcctctgagctttttcagagagaggtgtcagtggtggatattctcagtcatgcatctgtgtggctgttccgaggggactttgtgatggactaccccaggccaatcatgcccaacatggtcttcattgggggcatca

SEQ ID NO: 206 - protein, 294 aa, Homosapiens
MACLLRSFQRISAGVFFLALWGMVVGDKLLVVPQDGSHWLSMKDIVEVLSDRGHEIVVVVPEVNLLLKESKYYTRKIYPVPYDQEELKNRYQSFGNNHFAERSFLTAPQTEYRNNMIVIGLYFINCQSLLQDRDTLNFFKESKFDALFTDPALPCGVILAEYLGLPSVYLFRGFPCSLEHTFSRSPDPVSYIPRCYTKFSDHMTFSQRVANFLVNLLEPYLFYCLFSKYEELASAVLKRDVDIITLYQKVSVWLLRYDFVLEYPRPVMPNMVFIGGINCKKRKDLSQVLCGATT

SEQ ID NO: 207 - DNA, 2161 bp, Homosapiens
gggagaggtagacaggacctgtgaaaagcagtggttagtttagggaaaatacctaggagccctgtgatttggagagtgaaaactctttattaccgttgttactttaactctttccaggatggcctgcctccttcgctcatttcagagaatttctgcaggggttttcttcttagcactttggggcatggttgtaggtgacaagctgctggtggtccctcaggacggaagccactggcttagtatgaaggatatagttgaggttctcagtgaccggggtcatgagattgtagtggtggtgcctgaagttaatttgcttttgaaagaatccaaatactacacaagaaaaatctatccagtgccgtatgaccaagaagagctgaagaaccgttaccaatcatttggaaacaatcactttgctgagcgatcattcctaactgctcctcagacagagtacaggaataacatgattgttattggcctgtacttcatcaactgccagagcctcctgcaggacagggacaccctgaacttctttaaggagagcaagtttgatgctcttttcacagacccagccttaccctgtggggtgatcctggctgagtatttgggcctaccatctgtgtacctcttcaggggttttccgtgttccctggagcatacattcagcagaagcccagaccctgtgtcctacattcccaggtgctacacaaagttttcagaccacatgactttttcccaacgagtggccaacttccttgttaatttgttggagccctatctattttattgtctgttttcaaagtatgaagaactcgcatcagctgtcctcaagagagatgtggatataatcaccttatatcagaaggtctctgtttggctgttaagatatgactttgtgcttgaatatcctaggccggtcatgcccaacatggtcttcattggaggtatcaactgtaagaagaggaaagacttgtctcaggaatttgaagcctacattaatgcttctggagaacatggaattgtggttttctctttgggatcaatggtctcagaaattccagagaagaaagctatggcaattgctgatgctttgggcaaaatccctcagacagtcctgtggcggtacactggaacccgaccatcgaatcttgcgaacaacacgatacttgttaagtggctaccccaaaacgatctgcttggtcacccgatgacccgtgcctttatcacccatgctggttcccatggtgtttatgaaagcatatgcaatggcgttcccatggtgatgatgcccttgtttggtgatcagatggacaatgcaaagcgcatggagactaagggagctggagtgaccctgaatgttctggaaatgacttctgaagatttagaaaatgctctaaaagcagtcatcaatgacaaaagaaagaagcagcagtcaggaagacagatgtgaagagctggagcatgttcagatgagaggagacggaacacggggacacaccagcttgagcaagggacaacaggggaggactgatgactgacttcccacctttgaggtgctaatgtgtgtgtggtggcactggataaaagatcaatgttggctaggcaccatggcacacgcctgtagtcccagccactctggaggctaaggcgggaggattgcttgagcccagaagttggaggctgctatgagccgtgatcatgccactgcactccagcaacctgggcaacagagtgagaccctgtctcaaaaaaaaaaaaaaaaatgaaaagtccacataacctgagcatcatgtgcccagagcgttgggtggtgtggtcccattccttccttccagcggcttcttctggccacctcaatgtcaggatgtcctgctcacatatcaataccattaaaacctgacttctttccctgcactgttgaagctccttcttgaggctcacattatggatataattttgattctttcttcagtggtatagataactacttgtaacctaagaacaacttggtgaaagtcctctaatacattattttttaaaaaaacacaaatcaatgagctcaacttattaactaactttcatctattcatttttgagccatccctgtctgattgtgaatctccatgattccaacactctgagctggggatagtgcctacac

SEQ ID NO: 208 - protein, 443 aa, Homosapiens
MACLLRSFQRISAGVFFLALWGMVVGDKLLVVPQDGSHWLSMKDIVEVLSDRGHEIVVVVPEVNLLLKESKYYTRKIYPVPYDQEELKNRYQSFGNNHFAERSFLTAPQTEYRNNMIVIGLYFINCQSLLQDRDTLNFFKESKFDALFTDPALPCGVILAEYLGLPSVYLFRGFPCSLEHTFSRSPDPVSYIPRCYTKFSDHMTFSQRVANFLVNLLEPYLFYCLFSKYEELASAVLKRDVDIITLYQKVSVWLLRYDFVLEYPRPVMPNMVFIGGINCKKRKDLSQEFEAYINASGEHGIVVFSLGSMVSEIPEKKAMAIADALGKIPQTVLWRYTGTRPSNLANNTILVKWLPQNDLLGHPMTRAFITHAGSHGVYESICNGVPMVMMPLFGDQMDNAKRMETKGAGVTLNVLEMTSEDLENALKAVINDKRKKQQSGRQM

SEQ ID NO: 209 - DNA, 1044 bp, Homosapiens
atggccacaggactccaggttcccctgccgcagctggccacaggactgctgcttctcctcagtgtccagccctgggctgagagtgggaaggtgctggtggtgcccactgatggcagccactggctcagcatgcgggaggccttgcgggacctccatgcgagaggccaccaggtggtggtcctcaccctggaggtgaatatgtacatcaaagaagagaactttttcaccctgacaacgtatgccatttcatggacccaggacgaatttgatcgccttttgctgggtcacactcaatcgttctttgaaacagaacatcttctgatgaaattttctagaagaatggcaattatgaacaatatgtctttgatcatacataggtcttgtgtggagctactgcataatgaggccctgatcaggcacctgcatgctacttcctttgatgtggttctaacagacccctttcacctctgcgcggcggtgctggctaagtacctgtcgattcctgctgtgtttttcttgaggaacattccatgtgatttagactttaagggcacacagtgtccaaacccttcctcctatattcctagattactaacgaccaattcagaccacatgacattcctgcaaagggtcaagaacatgctctaccctctggccctgtcctacctttgccatgctgtttctgctccttatgcaagccttgcctctgagctttttcagagagaggtgtcagtggtggatcttgtcagccatgcatctgtgtggctgttccgaggggactttgtgatggattaccccaggccgatcatgcccaacatggtcttcattgggggcatcaactgtgccaacgggaagccactatctcaggatgaaataaaggcctggatgaatggatacttcagtctctatgcagacttgcagaagactggagcctttggcattcagaagaggaattcagactgtgcaagatctgaggccaggctccagctccccaggtcctttggtgagcaggagctccctgaacccaccgtgggtccttgctag

SEQ ID NO: 210 - protein, 347 aa, Homosapiens
MATGLQVPLPQLATGLLLLLSVQPWAESGKVLVVPTDGSHWLSMREALRDLHARGHQVVVLTLEVNMYIKEENFFTLTTYAISWTQDEFDRLLLGHTQSFFETEHLLMKFSRRMAIMNNMSLIIHRSCVELLHNEALIRHLHATSFDVVLTDPFHLCAAVLAKYLSIPAVFFLRNIPCDLDFKGTQCPNPSSYIPRLLTTNSDHMTFLQRVKNMLYPLALSYLCHAVSAPYASLASELFQREVSVVDLVSHASVWLFRGDFVMDYPRPIMPNMVFIGGINCANGKPLSQDEIKAWMNGYFSLYADLQKTGAFGIQKRNSDCARSEARLQLPRSFGEQELPEPTVGPC

SEQ ID NO: 211 - DNA, 2356 bp, Homosapiens
atggccacaggactccaggttcccctgccgcagctggccacaggactgctgcttctcctcagtgtccagccctgggctgagagtgggaaggtgctggtggtgcccactgatggcagccactggctcagcatgcgggaggccttgcgggacctccatgcgagaggccaccaggtggtggtcctcaccctggaggtgaatatgtacatcaaagaagagaactttttcaccctgacaacgtatgccatttcatggacccaggacgaatttgatcgccttttgctgggtcacactcaatcgttctttgaaacagaacatcttctgatgaaattttctagaagaatggcaattatgaacaatatgtctttgatcatacataggtcttgtgtggagctactgcataatgaggccctgatcaggcacctgcatgctacttcctttgatgtggttctaacagacccctttcacctctgcgcggcggtgctggctaagtacctgtcgattcctgctgtgtttttcttgaggaacattccatgtgatttagactttaagggcacacagtgtccaaacccttcctcctatattcctagattactaacgaccaattcagaccacatgacattcctgcaaagggtcaagaacatgctctaccctctggccctgtcctacctttgccatgctgtttctgctccttatgcaagccttgcctctgagctttttcagagagaggtgtcagtggtggatcttgtcagccatgcatctgtgtggctgttccgaggggactttgtgatggattaccccaggccgatcatgcccaacatggtcttcattgggggcatcaactgtgccaacgggaagccactatctcaggaatttgaagcctacattaatgcttctggagaacatggaattgtggttttctctttgggatcaatggtctcagaaattccagagaagaaagctatggcaattgctgatgctttgggcaaaatccctcagacagtcctgtggcggtacactggaacccgaccatcgaatcttgcgaacaacacgatacttgttaagtggctaccccaaaacgatctgcttggtcacccgatgacccgtgcctttatcacccatgctggttcccatggtgtttatgaaagcatatgcaatggcgttcccatggtgatgatgcccttgtttggtgatcagatggacaatgcaaagcgcatggagactaagggagctggagtgaccctgaatgttctggaaatgacttctgaagatttagaaaatgctctaaaagcagtcatcaatgacaaaagttacaaggagaacatcatgcgcctctccagccttcacaaggaccgcccggtggagccgctggacctggccgtgttctgggtggagtttgtgatgaggcacaagggcgcgccacacctgcgccccgcagcccacgacctcacctggtaccagtaccattccttggacgtgattggtttcctcttggccgtcgtgctgacagtggccttcatcacctttaaatgttgtgcttatggctaccggaaatgcttggggaaaaaagggcgagttaagaaagcccacaaatccaagacccattgagaagtgggtgggaaataaggtaaaattttgaaccattccctagtcatttccaaacttgaaaacagaatcagtgttaaattcattttattcttattaaggaaatactttgcataaattaatcagccccagagtgctttaaaaaattctcttaaataaaaataatagactcgctagtcagtaaagatatttgaatatgtatcgtgccccctctggtgtctttgatcaggatgacatgtgccatttttcagaggacgtgcagacaggctggcattctagattacttttcttactctgaaacatggcctgtttgggagtgcgggattcaaaggtggtcccacggctgcccctactgcaaatggcagttttaatcttatcttttggcttctgcagatggttgcaattgatccttaaccaataatggtcagtcctcatctctgtcgtgcttcataggtgccaccttgtgtgtttaaagaagggaagctttgtacctttagagtgtaggtgaaatgaatgaatggcttggagtgcactgagaacagcatatgatttcttgctttggggaaaaagaatgatgctatgaaattggtgggtggtgtatttgagaagataatcattgcttatgtcaaatggagctgaatttgataaaaacccaaaatacagctatgaagtgctgggcaagtttactttttttctgatgtttcctacaactaaaaataaattaataaatttatataaattctatttaagtgtt

SEQ ID NO: 212 - protein, 534 aa, Homosapiens; identical to SEQ ID NO: 40

SEQ ID NO: 213 - DNA, 2399 bp, Homosapiens
acagcgtggggtggacagtcagctgtcggtggcttctgctgagatggccagaggactccaggttcccctgccgcggctggccacaggactgctgctcctcctcagtgtccagccctgggctgagagtggaaaggtgttggtggtgcccactgatggcagcccctggctcagcatgcgggaggccttgcgggagctccatgccagaggccaccaggcggtggtcctcaccccagaggtgaatatgcacatcaaagaagagaaatttttcaccctgacagcctatgctgttccatggacccagaaggaatttgatcgcgttacgctgggctacactcaagggttctttgaaacagaacatcttctgaagagatattctagaagtatggcaattatgaacaatgtatctttggcccttcataggtgttgtgtggagctactgcataatgaggccctgatcaggcacctgaatgctacttcctttgatgtggttttaacagaccccgttaacctctgtggggcggtgctggctaagtacctgtcgattcctgctgtgtttttttggaggtacattccatgtgacttagactttaagggcacacagtgtccaaatccttcctcctatattcctaagttactaacgaccaattcagaccacatgacattcctgcaaagggtcaagaacatgctctaccctctggccctgtcctacatttgccatactttttctgccccttatgcaagtcttgcctctgagctttttcagagagaggtgtcagtggtggatcttgtcagctatgcatccgtgtggctgttccgaggggactttgtgatggactaccccaggccgatcatgcccaacatggtcttcattgggggcatcaactgtgccaacgggaagccactatctcaggaatttgaagcctacattaatgcttctggagaacatggaattgtggttttctctttgggatcaatggtctcagaaattccagagaagaaagctatggcaattgctgatgctttgggcaaaatccctcagacagtcctgtggcggtacactggaacccgaccatcgaatcttgcgaacaacacgatacttgttaagtggctaccccaaaacgatctgcttggtcacccgatgacccgtgcctttatcacccatgctggttcccatggtgtttatgaaagcatatgcaatggcgttcccatggtgatgatgcccttgtttggtgatcagatggacaatgcaaagcgcatggagactaagggagctggagtgaccctgaatgttctggaaatgacttctgaagatttagaaaatgctctaaaagcagtcatcaatgacaaaagttacaaggagaacatcatgcgcctctccagccttcacaaggaccgcccggtggagccgctggacctggccgtgttctgggtggagtttgtgatgaggcacaagggcgcgccacacctgcgccccgcagcccacgacctcacctggtaccagtaccattccttggacgtgattggtttcctcttggccgtcgtgctgacagtggccttcatcacctttaaatgttgtgcttatggctaccggaaatgcttggggaaaaaagggcgagttaagaaagcccacaaatccaagacccattgagaagtgggtgggaaataaggtaaaattttgaaccattccctagtcatttccaaacttgaaaacagaatcagtgttaaattcattttattcttattaaggaaatactttgcataaattaatcagccccagagtgctttaaaaaattctcttaaataaaaataatagactcgctagtcagtaaagatatttgaatatgtatcgtgccccctctggtgtctttgatcaggatgacatgtgccatttttcagaggacgtgcagacaggctggcattctagattacttttcttactctgaaacatggcctgtttgggagtgcgggattcaaaggtggtcccacggctgcccctactgcaaatggcagttttaatcttatcttttggcttctgcagatggttgcaattgatccttaaccaataatggtcagtcctcatctctgtcgtgcttcataggtgccaccttgtgtgtttaaagaagggaagctttgtacctttagagtgtaggtgaaatgaatgaatggcttggagtgcactgagaacagcatatgatttcttgctttggggaaaaagaatgatgctatgaaattggtgggtggtgtatttgagaagataatcattgcttatgtcaaatggagctgaatttgataaaaacccaaaatacagctatgaagtgctgggcaagtttactttttttctgatgtttcctacaactaaaaataaattaataaatttatataaattctatttaagtgtt

SEQ ID NO: 214 - protein, 534 aa, Homosapiens; identical to SEQ ID NO: 42

SEQ ID NO: 215 - DNA, 2375 bp, Homosapiens
gtccgtgtcttctgctgagatggccacaggactccaggttcccctgccgtggctggccacaggactgctgcttctcctcagtgtccagccctgggctgagagtggaaaggtgttggtggtgcccattgatggcagccactggctcagcatgcgggaggtcttgcgggagctccatgccagaggccaccaggcagtggtcctcaccccagaggtgaatatgcacatcaaagaagagaactttttcaccctgacaacctatgccatttcgtggacccaggatgaatttgatcgccatgtgctgggccacactcaactgtactttgaaacagaacattttctgaagaaatttttcagaagtatggcaatgttgaacaatatgtctttggtctatcataggtcttgtgtggagctactacataatgaggccctgatcaggcacctgaatgctacttcctttgatgtggttttaacagaccccgttaacctctgcgcggcagtgctggctaagtacctgtcgattcctactgtgttttttttgaggaacattccatgtgatttagactttaagggcacacagtgtccaaacccttcctcctatattcctagattactaacaaccaattcagaccacatgacattcatgcaaagggtcaagaacatgctctaccctctggccctgtcctacatttgccatgctttttctgctccttatgcaagccttgcctctgagctttttcagagagaggtgtcagtggtggatattctcagtcatgcatctgtgtggctgttccgaggggactttgtgatggactaccccaggccaatcatgcccaacatggtcttcattgggggcatcaactgtgccaacaggaagccactatctcaggaatttgaagcctacattaatgcttctggagaacatggaattgtggttttctctttgggatcaatggtctcagaaattccagagaagaaagctatggcaattgctgatgctttgggcaaaatccctcagacagtcctgtggcggtacactggaacccgaccatcgaatcttgcgaacaacacgatacttgttaagtggctaccccaaaacgatctgcttggtcacccgatgacccgtgcctttatcacccatgctggttcccatggtgtttatgaaagcatatgcaatggcgttcccatggtgatgatgcccttgtttggtgatcagatggacaatgcaaagcgcatggagactaagggagctggagtgaccctgaatgttctggaaatgacttctgaagatttagaaaatgctctaaaagcagtcatcaatgacaaaagttacaaggagaacatcatgcgcctctccagccttcacaaggaccgcccggtggagccgctggacctggccgtgttctgggtggagtttgtgatgaggcacaagggcgcgccacacctgcgccccgcagcccacgacctcacctggtaccagtaccattccttggacgtgattggtttcctcttggccgtcgtgctgacagtggccttcatcacctttaaatgttgtgcttatggctaccggaaatgcttggggaaaaaagggcgagttaagaaagcccacaaatccaagacccattgagaagtgggtgggaaataaggtaaaattttgaaccattccctagtcatttccaaacttgaaaacagaatcagtgttaaattcattttattcttattaaggaaatactttgcataaattaatcagccccagagtgctttaaaaaattctcttaaataaaaataatagactcgctagtcagtaaagatatttgaatatgtatcgtgccccctctggtgtctttgatcaggatgacatgtgccatttttcagaggacgtgcagacaggctggcattctagattacttttcttactctgaaacatggcctgtttgggagtgcgggattcaaaggtggtcccacggctgcccctactgcaaatggcagttttaatcttatcttttggcttctgcagatggttgcaattgatccttaaccaataatggtcagtcctcatctctgtcgtgcttcataggtgccaccttgtgtgtttaaagaagggaagctttgtacctttagagtgtaggtgaaatgaatgaatggcttggagtgcactgagaacagcatatgatttcttgctttggggaaaaagaatgatgctatgaaattggtgggtggtgtatttgagaagataatcattgcttatgtcaaatggagctgaatttgataaaaacccaaaatacagctatgaagtgctgggcaagtttactttttttctgatgtttcctacaactaaaaataaattaataaatttatataaattctatttaagtgtt

SEQ ID NO: 216 - protein, 534 aa, Homosapiens; identical to SEQ ID NO: 44

SEQ ID NO: 217 - DNA, 749 bp, Homosapiens
atagtggactactacgaggtgctgggagtaccccggtaggcctcgtccgagggtatcaagaaggcgtaccgcaagctggcgctcaagtggcaccccgacaaaaaccccgaggacagggaggaagcggtgagaagattcaagcaggtggctgaggcctacgaggtgttgtcggacgcgtagaaacgcgatatctatgaccgctatggcgaggcgagggcggagggcggctgcgcaggcggcaggcccttcaaggaccccttcgagatttcgttcctttggctccctgggaagtgggggcctttcttccttctgcatgtcctacggtagtgatgggacaggcagcttcaagtccatgtcgacttccactgaaatagttgatggtaaaaaaatcaccaccaagagaatcattgagaatggccaagaaagggtggaagtggaggaagatggagagttgagttaaagtccttcataataaacggcatagagcagttgctccccattgacaccaagtaattccagtccacatttgcctttaagcacatctggaggaatagcggactttttttaggattgaaagtgaactttactttcagaacagctgtacccaagaatttataaacactttatgccaatgcctgtctttattgttgggactgcacggataggacctctgtttgtctttcgatcattgtaaatatctgtatgcaatttgctatttattaaacttaagcctgaggcagacaatgatt

SEQ ID NO: 218 - protein, 88 aa, Homosapiens
MTAMARRGRRAAAQAAGPSRTPSRFRSFGSLGSGGLSSFCMSYGSDGTGSFKSMSTSTEIVDGKKITTKRIIENGQERVEVEEDGELS

SEQ ID NO: 219 - DNA, 688 bp, Homosapiens
ctctgacctgtgcgcgggtgctggcagccttgccgctcgctgtgccagtgccccgcaggctctttggcagtccagcatagtggactactacgaggtgctgggagtaccccggtaggcctcgtccgagggtatcaagaaggcgtaccgcaagctggcgctcaagtggcaccccgacaaaaaccccgaggacagggaggaagcggatttcgttcctttggctccctgggaagtgggggcctttcttccttctgcatgtcctacggtagtgatgggacaggcagcttcaagtccatgtcgacttccactgaaatagttgatggtaaaaaaatcaccaccaagagaatcattgagaatggccaagaaagggtggaagtggaggaagatggagagttgagttaaagtccttcataataaacggcatagagcagttgctccccattgacaccaagtaattccagtccacatttgcctttaagcacatctggaggaatagcggactttttttaggattgaaagtgaactttactttcagaacagctgtacccaagaatttataaacactttatgccaatgcctgtctttattgttgggactgcacggataggacctctgtttgtctttcgatcattgtaaatatctgtatgcaatttgctatttattaaacttaagcctgaggcagacaatgatt

SEQ ID NO: 220 - protein, 48 aa, Homosapiens [sequence omitted]

SEQ ID NO: 221 - DNA, 2395 bp, Homosapiens
ataagtaggagagggcgaacctctggcaggagcaaaggcgccatggctgtggagtcccagggcggacgcccacttgtcctgggcctgctgctgtgtgtgctgggcccagtggtgtcccatgctgggaagatactgttgatcccagtggatggcagccactggctgagcatgcttggggccatccagcagctgcagcagaggggacatgaaatagttgtcctagcacctgacgcctcgttgtacatcagagacggagcattttacaccttgaagacgtaccctgtgccattccaaagggaggatgtgaaagagtcttttgttagtctcgggcataatgtttttgagaatgattctttcctgcagcgtgtgatcaaaacatacaagaaaataaaaaaggactctgctatgcttttgtctggctgttcccacttactgcacaacaaggagctcatggcctccctggcagaaagcagctttgatgtcatgctgacggaccctttccttccttgcagccccatcgtggcccagtacctgtctctgcccactgtattcttcttgcatgcactgccatgcagcctggaatttgaggctacccagtgccccaacccattctcctacgtgcccaggcctctctcctctcattcagatcacatgaccttcctgcagcgggtgaagaacatgctcattgccttttcacagaactttctgtgcgacgtggtttattccccgtatgcaacccttgcctcagaattccttcagagagaggtgactgtccaggacctattgagctctgcatctgtctggctgtttagaagtgactttgtgaaggattaccctaggcccatcatgcccaatatggtttttgttggtggaatcaactgccttcaccaaaatccactatcccaggaatttgaagcctacattaatgcttctggagaacatggaattgtggttttctctttgggatcaatggtctcagaaattccagagaagaaagctatggcaattgctgatgctttgggcaaaatccctcagacagtcctgtggcggtacactggaacccgaccatcgaatcttgcgaacaacacgatacttgttaagtggctaccccaaaacgatctgcttggtcacccgatgacccgtgcctttatcacccatgctggttcccatggtgtttatgaaagcatatgcaatggcgttcccatggtgatgatgcccttgtttggtgatcagatggacaatgcaaagcgcatggagactaagggagctggagtgaccctgaatgttctggaaatgacttctgaagatttagaaaatgctctaaaagcagtcatcaatgacaaaagttacaaggagaacatcatgcgcctctccagccttcacaaggaccgcccggtggagccgctggacctggccgtgttctgggtggagtttgtgatgaggcacaagggcgcgccacacctgcgccccgcagcccacgacctcacctggtaccagtaccattccttggacgtgattggtttcctcttggccgtcgtgctgacagtggccttcatcacctttaaatgttgtgcttatggctaccggaaatgcttggggaaaaaagggcgagttaagaaagcccacaaatccaagacccattgagaagtgggtgggaaataaggtaaaattttgaaccattccctagtcatttccaaacttgaaaacagaatcagtgttaaattcattttattcttattaaggaaatactttgcataaattaatcagccccagagtgctttaaaaaattctcttaaataaaaataatagactcgctagtcagtaaagatatttgaatatgtatcgtgccccctctggtgtctttgatcaggatgacatgtgccatttttcagaggacgtgcagacaggctggcattctagattacttttcttactctgaaacatggcctgtttgggagtgcgggattcaaaggtggtcccacggctgcccctactgcaaatggcagttttaatcttatcttttggcttctgcagatggttgcaattgatccttaaccaataatggtcagtcctcatctctgtcgtgcttcataggtgccaccttgtgtgtttaaagaagggaagctttgtacctttagagtgtaggtgaaatgaatgaatggcttggagtgcactgagaacagcatatgatttcttgctttggggaaaaagaatgatgctatgaaattggtgggtggtgtatttgagaagataatcattgcttatgtcaaatggagctgaatttgataaaaacccaaaatacagctatgaagtgctgggcaagtttactttttttctgatgtttcctacaactaaaaataaattaataaatttatataaattctatttaagtgtt

SEQ ID NO: 222 - protein, 533 aa, Homosapiens; identical to SEQ ID NO: 46

SEQ ID NO: 223 - DNA, 21 bp, Homo sapiens
tagctctgttsctatttgcca

SEQ ID NO: 224 - DNA, 21 bp, Homo sapiens
aaaagtggtgytagaaaactt

SEQ ID NO: 225 - DNA, 21 bp, Homo sapiens
atgtgtcagcrgttgcttctt

SEQ ID NO: 226 - DNA, 21 bp, Homo sapiens
gtgtttaccakgtagtgtgct

SEQ ID NO: 227 - DNA, 21 bp, Homo sapiens
taagatacacrtgaagtcaat

SEQ ID NO: 228 - DNA, 21 bp, Homo sapiens
ataactgatasgttttgagaa

SEQ ID NO: 229 - DNA, 21 bp, Homo sapiens
aagaagtagcrgagctgagaa

SEQ ID NO: 230 - DNA, 21 bp, Homo sapiens
accgggtgatkcatttccaca

SEQ ID NO: 231 - DNA, 21 bp, Homo sapiens
ggtgccagccrccaccagaag

SEQ ID NO: 232 - DNA, 21 bp, Homo sapiens
tcctattggcrtgaggataac

SEQ ID NO: 233 - DNA, 21 bp, Homo sapiens
aaaaccataaygattggtgtt

SEQ ID NO: 234 - DNA, 21 bp, Homo sapiens
tctcgctatcrtcttctgcct

SEQ ID NO: 235 - DNA, 21 bp, Homo sapiens
cactgcttccmgccaccctgc

SEQ ID NO: 236 - DNA, 21 bp, Homo sapiens
ataagcctctsccttctggaa

SEQ ID NO: 237 - DNA, 21 bp, Homo sapiens
aagcggggtgygatgtttgga

SEQ ID NO: 238 - DNA, 21 bp, Homo sapiens
cagggcagggyttggggctgg

SEQ ID NO: 239 - DNA, 21 bp, Homo sapiens
ggttaagtgaktgacaacagt

SEQ ID NO: 240 - DNA, 21 bp, Homo sapiens
tgtttttaagrctcttgatac

SEQ ID NO: 241 - DNA, 21 bp, Homo sapiens
ctggggaatgrgatgcaagtg

SEQ ID NO: 242 - DNA, 21 bp, Homo sapiens
cctcctataamatccactcct

SEQ ID NO: 243 - DNA, 21 bp, Homo sapiens
tttaagaacamacattttgga

SEQ ID NO: 244 - DNA, 21 bp, Homo sapiens
aggccccatgkttccacctgc

SEQ ID NO: 245 - DNA, 21 bp, Homo sapiens
gtaccaactayctgcaaggca

SEQ ID NO: 246 - DNA, 21 bp, Homo sapiens
ttctttacgamcactgaaatt

SEQ ID NO: 247 - DNA, 21 bp, Homo sapiens
gagagtggccrgtcctagatg

SEQ ID NO: 248 - DNA, 21 bp, Homo sapiens
tggtattagawgaaacacatt

SEQ ID NO: 249 - DNA, 21 bp, Homo sapiens
aacactcatgrtgtgccaagt

SEQ ID NO: 250 - DNA, 21 bp, Homo sapiens
ccccagaaacrgactctgagt

SEQ ID NO: 251 - DNA, 21 bp, Homo sapiens
tctcttttggrgagaaatgga

SEQ ID NO: 252 - DNA, 21 bp, Homo sapiens
attgaaaactraaaacatttc

SEQ ID NO: 253 - DNA, 21 bp, Homo sapiens
tactttgaccwggtttaactt

SEQ ID NO: 254 - DNA, 21 bp, Homo sapiens
aggagtcaggyggccttccca

SEQ ID NO: 255 - DNA, 21 bp, Homo sapiens
accctggagcyggcctcctct

SEQ ID NO: 256 - DNA, 21 bp, Homo sapiens
aagaatgacgytgatgagtga

SEQ ID NO: 257 - DNA, 21 bp, Homo sapiens
atatttgaacsttgcgtctag

SEQ ID NO: 258 - DNA, 21 bp, Homo sapiens
aaccacagagmgcatgtgtgt

SEQ ID NO: 259 - DNA, 21 bp, Homo sapiens
tggagacttgygcttcccccc

SEQ ID NO: 260 - DNA, 21 bp, Homo sapiens
ctttaaaaaayagagagtcag

SEQ ID NO: 261 - DNA, 21 bp, Homo sapiens
ctggttccttrcccggtggct

SEQ ID NO: 262 - DNA, 21 bp, Homo sapiens
ctggggaactrttggatgtct

SEQ ID NO: 263 - DNA, 21 bp, Homo sapiens
tcagtagaatrgccatgttgg

SEQ ID NO: 264 - DNA, 21 bp, Homo sapiens
aaaatgatggytattctcatt

SEQ ID NO: 265 - DNA, 21 bp, Homo sapiens
tgccagagtgwggaagaacat

SEQ ID NO: 266 - DNA, 21 bp, Homo sapiens
tccatgtaatmggtgttgtat

SEQ ID NO: 267 - DNA, 21 bp, Homo sapiens
acagtcatctrccagtgcgcc

SEQ ID NO: 268 - DNA, 21 bp, Homo sapiens
catgtggagcygtgagtatct

SEQ ID NO: 269 - DNA, 21 bp, Homo sapiens
ttagtacctgrtacagattca

SEQ ID NO: 270 - DNA, 21 bp, Homo sapiens
gatataaaaamgtatatatga

SEQ ID NO: 271 - DNA, 21 bp, Homo sapiens
gagagtataartgttatatca

SEQ ID NO: 272 - DNA, 21 bp, Homo sapiens
tccattaattrtagtaacagg

SEQ ID NO: 273 - DNA, 21 bp, Homo sapiens
agaattcaagmccatacattc

SEQ ID NO: 274 - DNA, 21 bp, Homo sapiens
ttttttttttwaaaaactttt

SEQ ID NO: 275 - DNA, 21 bp, Homo sapiens
attgtaatagragaatgtttc

SEQ ID NO: 276 - DNA, 21 bp, Homo sapiens
cctctattcgrccatttaaat

SEQ ID NO: 277 - DNA, 21 bp, Homo sapiens
tccagatgagyttcagtgtaa
